(19) United States
(12) Patent Application Publication
(10) Pub. No.: US 2016/0311903 A1
(43) Pub. Date: Oct. 27, 2016

(54) ANTI-PDL1 ANTIBODIES, ACTIVATABLE ANTI-PDL1 ANTIBODIES, AND METHODS OF USE THEREOF

(71) Applicant: CytomX Therapeutics, Inc., South San Francisco, CA (US)

(72) Inventors: James William West, Bend, OR (US); Li Mei, San Francisco, CA (US); Stephen James Moore, Danville, CA (US); Margaret T.L. Nguyen, San Francisco, CA (US); Daniel Robert Hostetter, Palo Alto, CA (US); Olga Vasiljeva, Cupertino, CA (US); Jason Gary Sagert, San Mateo, CA (US); Jonathan Alexander Terrett, Cupertino, CA (US)

(21) Appl. No.: 15/069,622

(22) Filed: Mar. 14, 2016

Related U.S. Application Data
(60) Provisional application No. 62/133,231, filed on Mar. 13, 2015.
(60) Provisional application No. 62/139,596, filed on Mar. 27, 2015.
(60) Provisional application No. 62/218,883, filed on Sep. 15, 2015.

(51) Int. Cl. C07K 16/28; A61K 39/395; A61K 47/48

(52) U.S. Cl. CPC C07K 16/2827; A61K 47/48561; A61K 47/48438; A61K 47/484; A61K 39/3955; C07K 2317/622; C07K 2317/21; C07K 2317/92; C07K 2317/55; C07K 2317/56

(57) ABSTRACT

The invention relates generally to antibodies that bind programmed death ligand 1 (PDL1), activatable antibodies that specifically bind to PDL1 and methods of making and using these anti-PDL1 antibodies and anti-PDL1 activatable antibodies in a variety of therapeutic, diagnostic and prophylactic indications.

### RELATED APPLICATIONS

[0001] This application claims the benefit of U.S. Provisional Application No. 62/133,231, filed Mar. 13, 2015; U.S. Provisional Application No. 62/139,596, filed Mar. 27, 2015; and U.S. Provisional Application No. 62/218,883, filed Sep. 15, 2015; the contents of each of which are incorporated herein by reference in their entirety.

### INCORPORATION BY REFERENCE OF SEQUENCE LISTING

[0002] The contents of the text file named “CYTM038002US_ST25.txt”, which was created on Jun. 27, 2016 and is 785 KB in size, are hereby incorporated by reference in their entirety.

### FIELD OF THE INVENTION

[0003] The invention relates generally to antibodies that bind programmed death ligand 1 (PDL1), activatable antibodies that specifically bind to PDL1 and methods of making and using these anti-PDL1 antibodies and anti-PDL1 activatable antibodies in a variety of therapeutic, diagnostic and prophylactic indications.

### BACKGROUND OF THE INVENTION

[0004] Antibody-based therapies have proven effective treatments for several diseases but in some cases, toxicities due to broad target expression have limited their therapeutic effectiveness. In addition, antibody-based therapeutics have exhibited other limitations such as rapid clearance from the circulation following administration.

[0005] In the realm of small molecule therapeutics, strategies have been developed to provide prodrugs of an active chemical entity. Such prodrugs are administered in a relatively inactive (or significantly less active) form. Once administered, the prodrug is metabolized in vivo into the active compound. Such prodrug strategies can provide for increased selectivity of the drug for its intended target and for a reduction of adverse effects.

[0006] Accordingly, there is a continued need in the field of antibody-based therapeutics for antibodies that mimic the desirable characteristics of the small molecule prodrug.

### SUMMARY OF THE INVENTION

[0007] The disclosure provides antibodies or antigen-binding fragments thereof that specifically bind programmed death ligand 1 (PDL1), also known as PD-L1, CD274, B7 homolog 1 and/or B7-H1. The use of the term “PDL1” is intended to cover any variation thereof, such as, by way of non-limiting example, PD-L1 and/or PDL-1, all variations are used herein interchangeably.

[0008] In some embodiments, the antibody includes an antibody or antigen-binding fragment thereof that specifically binds PDL1. In some embodiments, the antibody or antigen binding fragment thereof that binds PDL1 is a monoclonal antibody, domain antibody, single chain, Fab fragment, a F(ab′)₂ fragment, a scFv, a scAb, a dAb, a single domain heavy chain antibody, or a single domain light chain antibody. In some embodiments, such an antibody or antigen binding fragment thereof that binds PDL1 is a mouse, other rodent, chimeric, humanized or fully human monoclonal antibody.

[0009] In some embodiments, the antibody is an isolated antibody or antigen binding fragment thereof (AB) that specifically binds to mammalian PDL1, wherein the AB has one or more of the following characteristics: (a) the AB specifically binds to human PDL1 and murine PDL1; (b) the AB specifically binds to human PDL1 and cynomolgus monkey PDL1; (c) the AB specifically binds to human PDL1, murine PDL1, and cynomolgus monkey PDL1; (d) the AB inhibits binding of human B7-1 and human PD1 to human PDL1 with an EC₅₀ value less than 10 nM; (e) the AB inhibits binding of murine B7-1 and murine PD1 to murine PDL1 with an EC₅₀ value less than 10 nM; and (f) the AB inhibits binding of cynomolgus monkey B7-1 and cynomolgus monkey PD1 to cynomolgus monkey PDL1 with an EC₅₀ value less than 10 nM.

[0010] In some embodiments, the antibody or antigen binding fragment thereof specifically binds to the mammalian PDL1 with a dissociation constant is less than or equal to 0.01 nM, less than or equal to 0.05 nM, less than or equal to 0.1 nM, less than or equal to 0.2 nM, less than or equal to 0.3 nM, less than or equal to 0.4 nM, less than or equal to 0.5 nM, less than or equal to 0.75 nM, and less than or equal to 1 nM.

[0011] In some embodiments, the antibody or antigen binding fragment thereof specifically binds to the mammalian PDL1 with a dissociation constant in the range of 0.01 nM to 1 nM, 0.05 nM to 1 nM, 0.1 nM to 1 nM, 0.2 nM to 1 nM, 0.3 nM to 1 nM, 0.4 nM to 1 nM, 0.5 nM to 1 nM, 0.75 nM to 1 nM, 0.01 nM to 0.75 nM, 0.05 nM to 0.75 nM, 0.1 nM to 0.75 nM, 0.2 nM to 0.75 nM, 0.3 nM to 0.75 nM, 0.4 nM to 0.75 nM, 0.5 nM to 0.75 nM, 0.01 nM to 0.5 nM, 0.05 nM to 0.5 nM, 0.1 nM to 0.5 nM, 0.2 nM to 0.5 nM, 0.3 nM to 0.5 nM, 0.4 nM to 0.5 nM, 0.01 nM to 0.4 nM, 0.05 nM to 0.4 nM, 0.1 nM to 0.4 nM, 0.2 nM to 0.4 nM, 0.3 nM to 0.4 nM, 0.01 nM to 0.3 nM, 0.05 nM to 0.3 nM, 0.1 nM to 0.3 nM, 0.2 nM to 0.3 nM, 0.01 nM to 0.2 nM, 0.05 nM to 0.2 nM, 0.1 nM to 0.2 nM, 0.01 nM to 0.1 nM, 0.05 nM to 0.1 nM, or 0.01 nM to 0.05 nM.

[0012] In some embodiments, the mammalian PDL1 is selected from the group consisting of a human PDL1, a murine PDL1, a rat PDL1, and a cynomolgus monkey PDL1.

[0013] In some embodiments, the antibody or antigen binding fragment thereof specifically binds to human PDL1, murine PDL1 or cynomolgus monkey PDL1 with a dissociation constant of less than 1 nM.

[0014] In some embodiments, the mammalian PDL1 is a human PDL1.

[0015] In some embodiments, the antibody or antigen binding fragment thereof has one or more of the following characteristics: (a) the AB specifically binds human PDL1, murine PDL1, and cynomolgus monkey PDL1; (b) the AB inhibits binding of human B7-1 and human PD1 to human PDL1; (c) the AB inhibits binding of murine B7-1 and murine PD1 to murine PDL1; and (d) the AB inhibits binding of cynomolgus monkey B7-1 and cynomolgus monkey PD1 to cynomolgus monkey PDL1.

[0016] In some embodiments, the antibody or antigen binding fragment thereof blocks the ability of a natural ligand to bind to the mammalian PDL1 with an EC₅₀ less than or equal to 0.5 nM, less than or equal to 1 nM, less than or equal to 2 nM, less than or equal to 3 nM, less than or equal to 4 nM, less than or equal to 5 nM, less than or equal to 6 nM, less than or equal to 7 nM, less than or equal to 8 nM, less than or equal to 9 nM, and/or less than or equal to 10 nM.

[0017] In some embodiments, the antibody or antigen binding fragment thereof blocks the ability of a natural ligand to bind to the mammalian PDL1 with an EC₅₀ in the range of 0.5 nM to 10 nM, 0.5 nM to 5 nM, 0.5 nM to 3 nM, 0.5 nM to 2 nM, 0.5 nM to 1 nM, 1 nM to 10 nM, 1 nM to 5 nM, 1 nM to 3 nM, 1 nM to 2 nM, 2 nM to 10 nM, 2 nM to 5 nM, 2 nM to 3 nM, 3 nM to 10 nM, 3 nM to 5 nM, or 5 nM to 10 nM. In some embodiments, the natural ligand is a mammalian PD1. In some embodiments, the natural ligand is selected from the group consisting of: a human PD1, a murine PD1, and a cynomolgus monkey PD1.

[0018] In some embodiments, the natural ligand is a mammalian B7-1. In some embodiments, the natural ligand is selected from the group consisting of: a human B7-1, a murine B7-1, and a cynomolgus monkey B7-1.

[0019] In some embodiments, the antibody comprises a heavy chain amino acid sequence selected from the group consisting of SEQ ID NO: 14, 16, 18, 20, 22, 24, 26, 28, 30, 32, 34, 36, 38, 40, 42, 44, 46, 48, 50, 52, 54, and 56. In some embodiments, the antibody comprises a light chain amino acid sequence comprising SEQ ID NO: 12 or SEQ ID NO: 58. In some embodiments, the antibody comprises a light chain amino acid sequence comprising SEQ ID NO: 12. In some embodiments, the antibody comprises a light chain amino acid sequence comprising SEQ ID NO: 58.

[0020] In some embodiments, the antibody comprises a heavy chain amino acid sequence comprising an amino acid sequence selected from the group consisting of SEQ ID NO: 46, 48, 50, 52, 54, and 56, and a light chain amino acid sequence comprising SEQ ID NO: 58.

[0021] In some embodiments, the antibody comprises a heavy chain amino acid sequence comprising an amino acid sequence selected from the group consisting of SEQ ID NO: 46, 48, 50, 52, 54, and 56, and a light chain amino acid sequence comprising SEQ ID NO: 12.

[0022] In some embodiments, the antibody comprises a heavy chain amino acid sequence that is at least 90%, 91%, 92%, 93%, 94%, 95%, 96%, 97%, 98% or 99% identical to an amino acid sequence selected from the group consisting of SEQ ID NO: 14, 16, 18, 20, 22, 24, 26, 28, 30, 32, 34, 36, 38, 40, 42, 44, 46, 48, 50, 52, 54, and 56. In some embodiments, the antibody comprises a light chain amino acid that is at least 90%, 91%, 92%, 93%, 94%, 95%, 96%, 97%, 98% or 99% identical to the amino acid sequence of SEQ ID NO: 58. In some embodiments, the antibody comprises a light chain amino acid that is at least 90%, 91%, 92%, 93%, 94%, 95%, 96%, 97%, 98% or 99% identical to the amino acid sequence of SEQ ID NO: 12. In some embodiments, the antibody comprises a heavy chain amino acid sequence that is at least 90%, 91%, 92%, 93%, 94%, 95%, 96%, 97%, 98% or 99% identical to an amino acid sequence selected from the group consisting of SEQ ID NO: 46, 48, 50, 52, 54, and 56, and a light chain amino acid that is at least 90%, 91%, 92%, 93%, 94%, 95%, 96%, 97%, 98% or 99% identical to the amino acid sequence of SEQ ID NO: 58. In some embodiments, the antibody comprises a heavy chain amino acid sequence that is at least 90%, 91%, 92%, 93%, 94%, 95%, 96%, 97%, 98% or 99% identical to an amino acid sequence selected from the group consisting of SEQ ID NO: 46, 48, 50, 52, 54, and 56, and a light chain amino acid that is at least 90%, 91%, 92%, 93%, 94%, 95%, 96%, 97%, 98% or 99% identical to the amino acid sequence of SEQ ID NO: 12.

[0023] In some embodiments, the antibody comprises the heavy chain amino acid sequence of SEQ ID NO: 46 and the light chain amino acid sequence of SEQ ID NO: 58. In some embodiments, the antibody comprises the heavy chain amino acid sequence of SEQ ID NO: 46 and the light chain amino acid sequence of SEQ ID NO: 12.

[0024] In some embodiments, the antibody comprises a heavy chain amino acid sequence that is at least 90%, 91%, 92%, 93%, 94%, 95%, 96%, 97%, 98% or 99% identical to the amino acid of SEQ ID NO: 46. In some embodiments, the antibody comprises a light chain amino acid that is at least 90%, 91%, 92%, 93%, 94%, 95%, 96%, 97%, 98% or 99% identical to the amino acid sequence of SEQ ID NO: 58. In some embodiments, the antibody comprises a light chain amino acid that is at least 90%, 91%, 92%, 93%, 94%, 95%, 96%, 97%, 98% or 99% identical to the amino acid sequence of SEQ ID NO: 12. In some embodiments, the antibody comprises a heavy chain amino acid sequence that is at least 90%, 91%, 92%, 93%, 94%, 95%, 96%, 97%, 98% or 99% identical to the amino acid sequence selected of SEQ ID NO: 46, and a light chain amino acid that is at least 90%, 91%, 92%, 93%, 94%, 95%, 96%, 97%, 98% or 99% identical to the amino acid sequence of SEQ ID NO: 58. In some embodiments, the antibody comprises a heavy chain amino acid sequence that is at least 90%, 91%, 92%, 93%, 94%, 95%, 96%, 97%, 98% or 99% identical to the amino acid sequence selected of SEQ ID NO: 46, and a light chain amino acid that is at least 90%, 91%, 92%, 93%, 94%, 95%, 96%, 97%, 98% or 99% identical to the amino acid sequence of SEQ ID NO: 12.

[0025] In some embodiments, the antibody comprises a combination of a variable heavy chain complementarity determining region 1 (VH CDR1, also referred to herein as CDRH1) sequence, a variable heavy chain complementarity determining region 2 (VH CDR2, also referred to herein as CDRH2) sequence, a variable heavy chain complementarity determining region 3 (VH CDR3, also referred to herein as CDRH3) sequence, a variable light chain complementarity determining region 1 (VL CDR1, also referred to herein as CDRL1) sequence, a variable light chain complementarity determining region 2 (VL CDR2, also referred to herein as CDRL2) sequence, and a variable light chain complementarity determining region 3 (VL CDR3, also referred to herein as CDRL3) sequence, wherein at least one CDR sequence is selected from the group consisting of a VH CDR1 sequence shown in Table 16; a VH CDR2 sequence shown in Table 16; a VH CDR3 sequence shown in Table 16; a VL CDR1 sequence shown in Table 16; a VL CDR2 sequence shown in Table 16; and a VL CDR3 sequence shown in Table 16.

[0026] In some embodiments, the antibody comprises a combination of a VH CDR1 sequence, a VH CDR2 sequence, a VH CDR3 sequence, a VL CDR1 sequence, a VL CDR2 sequence, and a VL CDR3 sequence, wherein at least one CDR sequence is selected from the group consisting of a VH CDR1 sequence that includes a sequence that is at least 90%, 91%, 92%, 93%, 94%, 95%, 96%, 97%, 98%, 99% or more identical to a VH CDR1 sequence shown in Table 16; a VH CD2 sequence that includes a sequence that is at least 90%, 91%, 92%, 93%, 94%, 95%, 96%, 97%, 98%, 99% or more identical to a VH CDR2 sequence shown in Table 16; a VH CDR3 sequence that includes a sequence that is at least 90%, 91%, 92%, 93%, 94%, 95%, 96%, 97%, 98%, 99% or more identical to a VH CDR3 sequence shown in Table 16; a VL CDR1 sequence that includes a sequence that is at least 90%, 91%, 92%, 93%, 94%, 95%, 96%, 97%, 98%, 99% or more identical to a VL CDR1 sequence shown in Table 16; a VL CDR2 sequence that includes a sequence that is at least 90%, 91%, 92%, 93%, 94%, 95%, 96%, 97%, 98%, 99% or more identical to a VL CDR2 sequence shown in Table 16; and a VL CDR3 sequence that includes a sequence that is at least 90%, 91%, 92%, 93%, 94%, 95%, 96%, 97%, 98%, 99% or more identical to a VL CDR3 sequence shown in Table 16.

[0027] In some embodiments, the antibody comprises a heavy chain that comprise a combination of a VH CDR1 sequence, a VH CDR2 sequence, and a VH CDR3 sequence, wherein the combination is a combination of the three heavy chain CDR sequences (VH CDR1, VH CDR2, VH CDR3) shown in a single row in Table 16.

[0028] In some embodiments, the antibody comprises a light chain that comprise a combination of a VL CDR1 sequence, a VL CDR2 sequence, and a VL CDR3 sequence, wherein the combination is a combination of the three light chain CDR sequences (VL CDR1, VL CDR2, VL CDR3) shown in a single row in Table 16.

[0029] In some embodiments, the antibody comprises a combination of a VH CDR1 sequence, a VH CDR2 sequence, a VH CDR3 sequence, a VL CDR1 sequence, a VL CDR2 sequence, and a VL CDR3 sequence, wherein the combination is a combination of the six CDR sequences (VH CDR1, VH CDR2, VH CDR3, VL CDR1, VL CDR2, and VL CDR3) shown in a single row in Table 16.

[0030] In some embodiments, the antibody comprises a combination of a VH CDR1 sequence, a VH CDR2 sequence, a VH CDR3 sequence, a VL CDR1 sequence, a VL CDR2 sequence, and a VL CDR3 sequence, wherein each CDR sequence in the combination comprises a sequence that is at least 90%, 91%, 92%, 93%, 94%, 95%, 96%, 97%, 98%, 99% or more identical to the corresponding CDR sequence in a combination of the six CDR sequences (VH CDR1, VH CDR2, VH CDR3, VL CDR1, VL CDR2, and VL CDR3) shown in a single row in Table 16.

[0031] In some embodiments, the antibody comprises a heavy chain that comprise a combination of a VH CDR1 sequence, a VH CDR2 sequence, and a VH CDR3 sequence, wherein each CDR sequence in the combination comprises a sequence that is at least 90%, 91%, 92%, 93%, 94%, 95%, 96%, 97%, 98%, 99% or more identical to the corresponding CDR sequence in a combination of three heavy chain CDR sequences (VH CDR1, VH CDR2, VH CDR3) shown in a single row in Table 16.

[0032] In some embodiments, the antibody comprises a light chain that comprise a combination of a VL CDR1 sequence, a VL CDR2 sequence, and a VL CDR3 sequence, wherein each CDR sequence in the combination comprises a sequence that is at least 90%, 91%, 92%, 93%, 94%, 95%, 96%, 97%, 98%, 99% or more identical to the corresponding CDR sequence in a combination of the three light chain CDR sequences (VL CDR1, VL CDR2, VL CDR3) shown in a single row in Table 16.

[0033] In some embodiments, the antibody comprises a combination of a VH CDR1 sequence, a VH CDR2 sequence, a VH CDR3 sequence, a VL CDR1 sequence, a VL CDR2 sequence, and a VL CDR3 sequence, wherein at least one CDR sequence is selected from the group consisting of a VL CDR1 sequence comprising RASQSISSYLN (SEQ ID NO: 209); a VL CDR2 sequence comprising AASSLQS (SEQ ID NO: 215); a VL CDR3 sequence comprising DNGYPST (SEQ ID NO: 228); a VH CDR1 sequence comprising SYAMS (SEQ ID NO: 212); a VH CDR2 sequence comprising SSIWRNGIVTVYADS (SEQ ID NO: 246); and a VH CDR3 sequence comprising WSAAFDY (SEQ ID NO: 235).

[0034] In some embodiments, the antibody comprises a combination of a VH CDR1 sequence, a VH CDR2 sequence, a VH CDR3 sequence, a VL CDR1 sequence, a VL CDR2 sequence, and a VL CDR3 sequence, wherein the VH CDR2 sequence comprises SSIWRNGIVTVYADS (SEQ ID NO: 246). In some embodiments, the antibody comprises a combination of a VH CDR1 sequence, a VH CDR2 sequence, a VH CDR3 sequence, a VL CDR1 sequence, a VL CDR2 sequence, and a VL CDR3 sequence, wherein the VH CDR3 sequence comprises WSAAFDY (SEQ ID NO: 235). In some embodiments, the antibody comprises a combination of a VH CDR1 sequence, a VH CDR2 sequence, a VH CDR3 sequence, a VL CDR1 sequence, a VL CDR2 sequence, and a VL CDR3 sequence, wherein the VH CDR2 sequence comprises SSIWRNGIVTVYADS (SEQ ID NO: 246), and the VH CDR3 sequence comprises WSAAFDY (SEQ ID NO: 235).

[0035] In some embodiments, the antibody comprises a combination of a VH CDR1 sequence, a VH CDR2 sequence, a VH CDR3 sequence, a VL CDR1 sequence, a VL CDR2 sequence, and a VL CDR3 sequence, wherein the combination comprises a VL CDR1 sequence comprising RASQSISSYLN (SEQ ID NO: 209); a VL CDR2 sequence comprising AASSLQS (SEQ ID NO: 215); a VL CDR3 sequence comprising DNGYPST (SEQ ID NO: 228); a VH CDR1 sequence comprising SYAMS (SEQ ID NO: 212); a VH CDR2 sequence comprising SSIWRNGIVTVYADS (SEQ ID NO: 246); and a VH CDR3 sequence comprising WSAAFDY (SEQ ID NO: 235).

[0036] In some embodiments, the antibody is encoded by a nucleic acid sequence that comprises a nucleic acid sequence encoding a heavy chain amino acid sequence selected from the group consisting of SEQ ID NO: 14, 16, 18, 20, 22, 24, 26, 28, 30, 32, 34, 36, 38, 40, 42, 44, 46, 48, 50, 52, 54, and 56. In some embodiments, the antibody is encoded by a nucleic acid sequence that comprises a nucleic acid sequence encoding a heavy chain amino acid sequence selected from the group consisting of SEQ ID NO: 46, 48, 50, 52, 54, and 56. In some embodiments, the antibody is encoded by a nucleic acid sequence that comprises a nucleic acid sequence encoding a light chain amino acid sequence comprising SEQ ID NO: 12 or SEQ ID NO: 58. In some embodiments, the antibody is encoded by a nucleic acid sequence that comprises a nucleic acid sequence encoding a light chain amino acid sequence comprising SEQ ID NO: 12. In some embodiments, the antibody is encoded by a nucleic acid sequence that comprises a nucleic acid sequence encoding a light chain amino acid sequence comprising SEQ ID NO: 58 In some embodiments, the antibody is encoded by a nucleic acid sequence that comprises a nucleic acid sequence encoding a heavy chain amino acid sequence selected from the group consisting of SEQ ID NO: 14, 16, 18, 20, 22, 24, 26, 28, 30, 32, 34, 36, 38, 40, 42, 44, 46, 48, 50, 52, 54, and 56, and a nucleic acid sequence that comprises a nucleic acid sequence encoding a light chain amino acid sequence comprising SEQ ID NO: 58. In some embodiments, the antibody is encoded by a nucleic acid sequence that comprises a nucleic acid sequence encoding a heavy chain amino acid sequence selected from the group consisting of SEQ ID NO: 14, 16, 18, 20, 22, 24, 26, 28, 30, 32, 34, 36, 38, 40, 42, 44, 46, 48, 50, 52, 54, and 56, and a nucleic acid sequence that comprises a nucleic acid sequence encoding a light chain amino acid sequence comprising SEQ ID NO: 12. In some embodiments, the antibody is encoded by a nucleic acid sequence that comprises a nucleic acid sequence encoding a heavy chain amino acid sequence selected from the group consisting of SEQ ID NO: 46, 48, 50, 52, 54, and 56, and a nucleic acid sequence that comprises a nucleic acid sequence encoding a light chain amino acid sequence comprising SEQ ID NO: 58. In some embodiments, the antibody is encoded by a nucleic acid sequence that comprises a nucleic acid sequence encoding a heavy chain amino acid sequence selected from the group consisting of SEQ ID NO: 46, 48, 50, 52, 54, and 56, and a nucleic acid sequence that comprises a nucleic acid sequence encoding a light chain amino acid sequence comprising SEQ ID NO: 12.

[0037] In some embodiments, the antibody is encoded by a nucleic acid sequence that comprises a nucleic acid sequence encoding a heavy chain amino acid sequence that is at least 90%, 91%, 92%, 93%, 94%, 95%, 96%, 97%, 98% or 99% identical to an amino acid sequence selected from the group consisting of SEQ ID NO: 14, 16, 18, 20, 22, 24, 26, 28, 30, 32, 34, 36, 38, 40, 42, 44, 46, 48, 50, 52, 54, and 56. In some embodiments, the antibody is encoded by a nucleic acid sequence that comprises a nucleic acid sequence encoding a heavy chain amino acid sequence that is at least 90%, 91%, 92%, 93%, 94%, 95%, 96%, 97%, 98% or 99% identical to an amino acid sequence selected from the group consisting of SEQ ID NO: 46, 48, 50, 52, 54, and 56. In some embodiments, the antibody is encoded by a nucleic acid sequence that comprises a nucleic acid sequence encoding a light chain amino acid that is at least 90%, 91%, 92%, 93%, 94%, 95%, 96%, 97%, 98% or 99% identical to the amino acid sequence of SEQ ID NO: 58. In some embodiments, the antibody is encoded by a nucleic acid sequence that comprises a nucleic acid sequence encoding a light chain amino acid that is at least 90%, 91%, 92%, 93%, 94%, 95%, 96%, 97%, 98% or 99% identical to the amino acid sequence of SEQ ID NO: 12. In some embodiments, the antibody is encoded by a nucleic acid sequence that comprises a nucleic acid sequence encoding a heavy chain amino acid sequence that is at least 90%, 91%, 92%, 93%, 94%, 95%, 96%, 97%, 98% or 99% identical to an amino acid sequence selected from the group consisting of SEQ ID NO: 14, 16, 18, 20, 22, 24, 26, 28, 30, 32, 34, 36, 38, 40, 42, 44, 46, 48, 50, 52, 54, and 56, and a nucleic acid sequence that comprises a nucleic acid sequence encoding a light chain amino acid that is at least 90%, 91%, 92%, 93%, 94%, 95%, 96%, 97%, 98% or 99% identical to the amino acid sequence of SEQ ID NO: 58. In some embodiments, the antibody is encoded by a nucleic acid sequence that comprises a nucleic acid sequence encoding a heavy chain amino acid sequence that is at least 90%, 91%, 92%, 93%, 94%, 95%, 96%, 97%, 98% or 99% identical to an amino acid sequence selected from the group consisting of SEQ ID NO: 14, 16, 18, 20, 22, 24, 26, 28, 30, 32, 34, 36, 38, 40, 42, 44, 46, 48, 50, 52, 54, and 56, and a nucleic acid sequence that comprises a nucleic acid sequence encoding a light chain amino acid that is at least 90%, 91%, 92%, 93%, 94%, 95%, 96%, 97%, 98% or 99% identical to the amino acid sequence of SEQ ID NO: 12. In some embodiments, the antibody is encoded by a nucleic acid sequence that comprises a nucleic acid sequence encoding a heavy chain amino acid sequence that is at least 90%, 91%, 92%, 93%, 94%, 95%, 96%, 97%, 98% or 99% identical to an amino acid sequence selected from the group consisting of SEQ ID NO: 46, 48, 50, 52, 54, and 56, and a nucleic acid sequence that comprises a nucleic acid sequence encoding a light chain amino acid that is at least 90%, 91%, 92%, 93%, 94%, 95%, 96%, 97%, 98% or 99% identical to the amino acid sequence of SEQ ID NO: 58. In some embodiments, the antibody is encoded by a nucleic acid sequence that comprises a nucleic acid sequence encoding a heavy chain amino acid sequence that is at least 90%, 91%, 92%, 93%, 94%, 95%, 96%, 97%, 98% or 99% identical to an amino acid sequence selected from the group consisting of SEQ ID NO: 46, 48, 50, 52, 54, and 56, and a nucleic acid sequence that comprises a nucleic acid sequence encoding a light chain amino acid that is at least 90%, 91%, 92%, 93%, 94%, 95%, 96%, 97%, 98% or 99% identical to the amino acid sequence of SEQ ID NO: 12.

[0038] In some embodiments, the antibody is encoded by a heavy chain nucleic acid sequence selected from the group consisting of SEQ ID NO: 13, 15, 17, 21, 23, 25, 27, 29, 31, 33, 35, 37, 39, 41, 43, 45, 47, 49, 51, 53, and 55. In some embodiments, the antibody is encoded by a heavy chain nucleic acid sequence selected from the group consisting of SEQ ID NO: 45, 47, 49, 51, 53, and 55. In some embodiments, the antibody is encoded by the light chain nucleic acid sequence of SEQ ID NO: 57. In some embodiments, the antibody is encoded by the light chain nucleic acid sequence of SEQ ID NO: 11. In some embodiments, the antibody is encoded by heavy chain nucleic acid sequence selected from the group consisting of SEQ ID NO: 13, 15, 17, 21, 23, 25, 27, 29, 31, 33, 35, 37, 39, 41, 43, 45, 47, 49, 51, 53, and 55, and a light chain nucleic acid sequence comprising SEQ ID NO: 57. In some embodiments, the antibody is encoded by heavy chain nucleic acid sequence selected from the group consisting of SEQ ID NO: 13, 15, 17, 21, 23, 25, 27, 29, 31, 33, 35, 37, 39, 41, 43, 45, 47, 49, 51, 53, and 55, and a light chain nucleic acid sequence comprising SEQ ID NO: 11. In some embodiments, the antibody is encoded by a nucleic acid sequence that comprises a heavy chain nucleic acid sequence selected from the group consisting of SEQ ID NO: 45, 47, 49, 51, 53, and 55, and a light chain nucleic acid sequence comprising SEQ ID NO: 57. In some embodiments, the antibody is encoded by a nucleic acid sequence that comprises a heavy chain nucleic acid sequence selected from the group consisting of SEQ ID NO: 45, 47, 49, 51, 53, and 55, and a light chain nucleic acid sequence comprising SEQ ID NO: 11.

[0039] In some embodiments, the antibody is encoded by a nucleic acid sequence that is at least 90%, 91%, 92%, 93%, 94%, 95%, 96%, 97%, 98% or 99% identical to a heavy chain nucleic acid sequence selected from the group consisting of SEQ ID NO: 13, 15, 17, 21, 23, 25, 27, 29, 31, 33, 35, 37, 39, 41, 43, 45, 47, 49, 51, 53, and 55. In some embodiments, the antibody is encoded by a nucleic acid sequence that is at least 90%, 91%, 92%, 93%, 94%, 95%, 96%, 97%, 98% or 99% identical to a heavy chain nucleic acid sequence selected from the group consisting of SEQ ID NO: 45, 47, 49, 51, 53, and 55. In some embodiments, the antibody is encoded by a nucleic acid sequence that is at least 90%, 91%, 92%, 93%, 94%, 95%, 96%, 97%, 98% or 99% identical to the light chain nucleic acid sequence of SEQ ID NO: 57. In some embodiments, the antibody is encoded by a nucleic acid sequence that is at least 90%, 91%, 92%, 93%, 94%, 95%, 96%, 97%, 98% or 99% identical to the light chain nucleic acid sequence of SEQ ID NO: 11. In some embodiments, the antibody is encoded by a nucleic acid sequence that is at least 90%, 91%, 92%, 93%, 94%, 95%, 96%, 97%, 98% or 99% identical to a heavy chain nucleic acid sequence selected from the group consisting of SEQ ID NO: 13, 15, 17, 21, 23, 25, 27, 29, 31, 33, 35, 37, 39, 41, 43, 45, 47, 49, 51, 53, and 55, and a nucleic acid sequence that is at least 90%, 91%, 92%, 93%, 94%, 95%, 96%, 97%, 98% or 99% identical to the light chain nucleic acid sequence comprising SEQ ID NO: 57. In some embodiments, the antibody is encoded by a nucleic acid sequence that is at least 90%, 91%, 92%, 93%, 94%, 95%, 96%, 97%, 98% or 99% identical to a heavy chain nucleic acid sequence selected from the group consisting of SEQ ID NO: 13, 15, 17, 21, 23, 25, 27, 29, 31, 33, 35, 37, 39, 41, 43, 45, 47, 49, 51, 53, and 55, and a nucleic acid sequence that is at least 90%, 91%, 92%, 93%, 94%, 95%, 96%, 97%, 98% or 99% identical to the light chain nucleic acid sequence comprising SEQ ID NO: 11. In some embodiments, the antibody is encoded by a nucleic acid sequence that comprises a nucleic acid sequence that is at least 90%, 91%, 92%, 93%, 94%, 95%, 96%, 97%, 98% or 99% identical to heavy chain nucleic acid sequence selected from the group consisting of SEQ ID NO: 45, 47, 49, 51, 53, and 55, and a nucleic acid sequence that is at least 90%, 91%, 92%, 93%, 94%, 95%, 96%, 97%, 98% or 99% identical to light chain nucleic acid sequence comprising SEQ ID NO: 57. In some embodiments, the antibody is encoded by a nucleic acid sequence that comprises a nucleic acid sequence that is at least 90%, 91%, 92%, 93%, 94%, 95%, 96%, 97%, 98% or 99% identical to heavy chain nucleic acid sequence selected from the group consisting of SEQ ID NO: 45, 47, 49, 51, 53, and 55, and a nucleic acid sequence that is at least 90%, 91%, 92%, 93%, 94%, 95%, 96%, 97%, 98% or 99% identical to light chain nucleic acid sequence comprising SEQ ID NO: 11.

[0040] In some embodiments, the antibody or antigen-binding fragment thereof is incorporated in a multispecific antibody or antigen-binding fragment thereof, where at least one arm of the multispecific antibody specifically binds PDL1. In some embodiments, the antibody or antigen-binding fragment thereof is incorporated in a bispecific antibody or antigen-binding fragment thereof, where at least one arm of the bispecific antibody specifically binds PDL1.

[0041] In some embodiments, at least one arm of the multispecific antibody, e.g., a bispecific antibody, comprises a heavy chain amino acid sequence selected from the group consisting of SEQ ID NO: 14, 16, 18, 20, 22, 24, 26, 28, 30, 32, 34, 36, 38, 40, 42, 44, 46, 48, 50, 52, 54, and 56. In some embodiments, at least one arm of the multispecific antibody, e.g., a bispecific antibody, comprises a light chain amino acid sequence comprising SEQ ID NO: 12 or SEQ ID NO: 58. In some embodiments, at least one arm of the multispecific antibody, e.g., a bispecific antibody, comprises a light chain amino acid sequence comprising SEQ ID NO: 12. In some embodiments, at least one arm of the multispecific antibody, e.g., a bispecific antibody, comprises a light chain amino acid sequence comprising SEQ ID NO: 58.

[0042] In some embodiments, at least one arm of the multispecific antibody, e.g., a bispecific antibody, a heavy chain amino acid sequence comprising an amino acid sequence selected from the group consisting of SEQ ID NO: 46, 48, 50, 52, 54, and 56, and a light chain amino acid sequence comprising SEQ ID NO: 58.

[0043] In some embodiments, at least one arm of the multispecific antibody, e.g., a bispecific antibody, comprises a heavy chain amino acid sequence comprising an amino acid sequence selected from the group consisting of SEQ ID NO: 46, 48, 50, 52, 54, and 56, and a light chain amino acid sequence comprising SEQ ID NO: 12.

[0044] In some embodiments, at least one arm of the multispecific antibody, e.g., a bispecific antibody, comprises a heavy chain amino acid sequence that is at least 90%, 91%, 92%, 93%, 94%, 95%, 96%, 97%, 98% or 99% identical to an amino acid sequence selected from the group consisting of SEQ ID NO: 14, 16, 18, 20, 22, 24, 26, 28, 30, 32, 34, 36, 38, 40, 42, 44, 46, 48, 50, 52, 54, and 56. In some embodiments, at least one arm of the multispecific antibody, e.g., a bispecific antibody, comprises a light chain amino acid that is at least 90%, 91%, 92%, 93%, 94%, 95%, 96%, 97%, 98% or 99% identical to the amino acid sequence of SEQ ID NO: 58. In some embodiments, at least one arm of the multispecific antibody, e.g., a bispecific antibody, comprises a light chain amino acid that is at least 90%, 91%, 92%, 93%, 94%, 95%, 96%, 97%, 98% or 99% identical to the amino acid sequence of SEQ ID NO: 12. In some embodiments, at least one arm of the multispecific antibody, e.g., a bispecific antibody, comprises a heavy chain amino acid sequence that is at least 90%, 91%, 92%, 93%, 94%, 95%, 96%, 97%, 98% or 99% identical to an amino acid sequence selected from the group consisting of SEQ ID NO: 46, 48, 50, 52, 54, and 56, and a light chain amino acid that is at least 90%, 91%, 92%, 93%, 94%, 95%, 96%, 97%, 98% or 99% identical to the amino acid sequence of SEQ ID NO: 58. In some embodiments, at least one arm of the multispecific antibody, e.g., a bispecific antibody, comprises a heavy chain amino acid sequence that is at least 90%, 91%, 92%, 93%, 94%, 95%, 96%, 97%, 98% or 99% identical to an amino acid sequence selected from the group consisting of SEQ ID NO: 46, 48, 50, 52, 54, and 56, and a light chain amino acid that is at least 90%, 91%, 92%, 93%, 94%, 95%, 96%, 97%, 98% or 99% identical to the amino acid sequence of SEQ ID NO: 12.

[0045] In some embodiments, at least one arm of the multispecific antibody, e.g., a bispecific antibody, comprises the heavy chain amino acid sequence of SEQ ID NO: 46 and the light chain amino acid sequence of SEQ ID NO: 58. In some embodiments, at least one arm of the multispecific antibody, e.g., a bispecific antibody, comprises the heavy chain amino acid sequence of SEQ ID NO: 46 and the light chain amino acid sequence of SEQ ID NO: 12.

[0046] In some embodiments, at least one arm of the multispecific antibody, e.g., a bispecific antibody, comprises a heavy chain amino acid sequence that is at least 90%, 91%, 92%, 93%, 94%, 95%, 96%, 97%, 98% or 99% identical to the amino acid of SEQ ID NO: 46. In some embodiments, at least one arm of the multispecific antibody, e.g., a bispecific antibody, comprises a light chain amino acid that is at least 90%, 91%, 92%, 93%, 94%, 95%, 96%, 97%, 98% or 99% identical to the amino acid sequence of SEQ ID NO: 58. In some embodiments, at least one arm of the multispecific antibody, e.g., a bispecific antibody, comprises a light chain amino acid that is at least 90%, 91%, 92%, 93%, 94%, 95%, 96%, 97%, 98% or 99% identical to the amino acid sequence of SEQ ID NO: 12. In some embodiments, at least one arm of the multispecific antibody, e.g., a bispecific antibody, comprises a heavy chain amino acid sequence that is at least 90%, 91%, 92%, 93%, 94%, 95%, 96%, 97%, 98% or 99% identical to the amino acid sequence selected of SEQ ID NO: 46, and a light chain amino acid that is at least 90%, 91%, 92%, 93%, 94%, 95%, 96%, 97%, 98% or 99% identical to the amino acid sequence of SEQ ID NO: 58. In some embodiments, at least one arm of the multispecific antibody, e.g., a bispecific antibody, comprises a heavy chain amino acid sequence that is at least 90%, 91%, 92%, 93%, 94%, 95%, 96%, 97%, 98% or 99% identical to the amino acid sequence selected of SEQ ID NO: 46, and a light chain amino acid that is at least 90%, 91%, 92%, 93%, 94%, 95%, 96%, 97%, 98% or 99% identical to the amino acid sequence of SEQ ID NO: 12.

[0047] In some embodiments, at least one arm of the multispecific antibody, e.g., a bispecific antibody, comprises a combination of a variable heavy chain complementarity determining region 1 (VH CDR1, also referred to herein as CDRH1) sequence, a variable heavy chain complementarity determining region 2 (VH CDR2, also referred to herein as CDRH2) sequence, a variable heavy chain complementarity determining region 3 (VH CDR3, also referred to herein as CDRH3) sequence, a variable light chain complementarity determining region 1 (VL CDR1, also referred to herein as CDRL1) sequence, a variable light chain complementarity determining region 2 (VL CDR2, also referred to herein as CDRL2) sequence, and a variable light chain complementarity determining region 3 (VL CDR3, also referred to herein as CDRL3) sequence, wherein at least one CDR sequence is selected from the group consisting of a VH CDR1 sequence shown in Table 16; a VH CDR2 sequence shown in Table 16; a VH CDR3 sequence shown in Table 16; a VL CDR1 sequence shown in Table 16; a VL CDR2 sequence shown in Table 16; and a VL CDR3 sequence shown in Table 16.

[0048] In some embodiments, at least one arm of the multispecific antibody, e.g., a bispecific antibody, comprises a combination of a VH CDR1 sequence, a VH CDR2 sequence, a VH CDR3 sequence, a VL CDR1 sequence, a VL CDR2 sequence, and a VL CDR3 sequence, wherein at least one CDR sequence is selected from the group consisting of a VH CDR1 sequence that includes a sequence that is at least 90%, 91%, 92%, 93%, 94%, 95%, 96%, 97%, 98%, 99% or more identical to a VH CDR1 sequence shown in Table 16, a VH CD2 sequence that includes a sequence that is at least 90%, 91%, 92%, 93%, 94%, 95%, 96%, 97%, 98%, 99% or more identical to a VH CDR2 sequence shown in Table 16; a VH CDR3 sequence that includes a sequence that is at least 90%, 91%, 92%, 93%, 94%, 95%, 96%, 97%, 98%, 99% or more identical to a VH CDR3 sequence shown in Table 16; a VL CDR1 sequence that includes a sequence that is at least 90%, 91%, 92%, 93%, 94%, 95%, 96%, 97%, 98%, 99% or more identical to a VL CDR1 sequence shown in Table 16; a VL CDR2 sequence that includes a sequence that is at least 90%, 91%, 92%, 93%, 94%, 95%, 96%, 97%, 98%, 99% or more identical to a VL CDR2 sequence shown in Table 16; and a VL CDR3 sequence that includes a sequence that is at least 90%, 91%, 92%, 93%, 94%, 95%, 96%, 97%, 98%, 99% or more identical to a VL CDR3 sequence shown in Table 16.

[0049] In some embodiments, at least one arm of the multispecific antibody, e.g., a bispecific antibody, comprises a combination of a VH CDR1 sequence, a VH CDR2 sequence, a VH CDR3 sequence, a VL CDR1 sequence, a VL CDR2 sequence, and a VL CDR3 sequence, wherein the combination is a combination of the six CDR sequences (VH CDR1, VH CDR2, VH CDR3, VL CDR1, VL CDR2, and VL CDR3) shown in a single row in Table 16.

[0050] In some embodiments, at least one arm of the multispecific antibody, e.g., a bispecific antibody, comprises a heavy chain that comprise a combination of a VH CDR1 sequence, a VH CDR2 sequence, and a VH CDR3 sequence, wherein the combination is a combination of the three heavy chain CDR sequences (VH CDR1, VH CDR2, VH CDR3) shown in a single row in Table 16.

[0051] In some embodiments, at least one arm of the multispecific antibody, e.g., a bispecific antibody, comprises a combination of a VH CDR1 sequence, a VH CDR2 sequence, a VH CDR3 sequence, a VL CDR1 sequence, a VL CDR2 sequence, and a VL CDR3 sequence, wherein each CDR sequence in the combination comprises a sequence that is at least 90%, 91%, 92%, 93%, 94%, 95%, 96%, 97%, 98%, 99% or more identical to the corresponding CDR sequence in a combination of the six CDR sequences (VH CDR1, VH CDR2, VH CDR3, VL CDR1, VL CDR2, and VL CDR3) shown in a single row in Table 16.

[0052] In some embodiments, at least one arm of the multispecific antibody, e.g., a bispecific antibody, comprises a heavy chain that comprise a combination of a VH CDR1 sequence, a VH CDR2 sequence, and a VH CDR3 sequence, wherein each CDR sequence in the combination comprises a sequence that is at least 90%, 91%, 92%, 93%, 94%, 95%, 96%, 97%, 98%, 99% or more identical to the corresponding CDR sequence in a combination of three heavy chain CDR sequences (VH CDR1, VH CDR2, VH CDR3) shown in a single row in Table 16.

[0053] In some embodiments, at least one arm of the multispecific antibody, e.g., a bispecific antibody, comprises a combination of a VH CDR1 sequence, a VH CDR2 sequence, a VH CDR3 sequence, a VL CDR1 sequence, a VL CDR2 sequence, and a VL CDR3 sequence, wherein at least one CDR sequence is selected from the group consisting of a VL CDR1 sequence comprising RASQSISSYLN (SEQ ID NO: 209); a VL CDR2 sequence comprising AASSLQS (SEQ ID NO: 215); a VL CDR3 sequence comprising DNGYPST (SEQ ID NO: 228); a VH CDR1 sequence comprising SYAMS (SEQ ID NO: 212); a VH CDR2 sequence comprising SSIWRNGIVTVYADS (SEQ ID NO: 246); and a VH CDR3 sequence comprising WSAAFDY (SEQ ID NO: 235).

[0054] In some embodiments, at least one arm of the multispecific antibody, e.g., a bispecific antibody, comprises a combination of a VH CDR1 sequence, a VH CDR2 sequence, a VH CDR3 sequence, a VL CDR1 sequence, a VL CDR2 sequence, and a VL CDR3 sequence, wherein the VH CDR2 sequence comprises SSIWRNGIVTVYADS (SEQ ID NO: 246). In some embodiments, at least one arm of the multispecific antibody, e.g., a bispecific antibody, comprises a combination of a VH CDR1 sequence, a VH CDR2 sequence, a VH CDR3 sequence, a VL CDR1 sequence, a VL CDR2 sequence, and a VL CDR3 sequence, wherein the VH CDR3 sequence comprises WSAAFDY (SEQ ID NO: 235). In some embodiments, at least one arm of the multispecific antibody, e.g., a bispecific antibody, comprises a combination of a VH CDR1 sequence, a VH CDR2 sequence, a VH CDR3 sequence, a VL CDR1 sequence, a VL CDR2 sequence, and a VL CDR3 sequence, wherein the VH CDR2 sequence comprises SSIWRNGIVTVYADS (SEQ ID NO: 246), and the VH CDR3 sequence comprises WSAAFDY (SEQ ID NO: 235).

[0055] In some embodiments, at least one arm of the multispecific antibody, e.g., a bispecific antibody, comprises a combination of a VH CDR1 sequence, a VH CDR2 sequence, a VH CDR3 sequence, a VL CDR1 sequence, a VL CDR2 sequence, and a VL CDR3 sequence, wherein the combination comprises a VL CDR1 sequence comprising RASQSISSYLN (SEQ ID NO: 209); a VL CDR2 sequence comprising AASSLQS (SEQ ID NO: 215); a VL CDR3 sequence comprising DNGYPST (SEQ ID NO: 228); a VH CDR1 sequence comprising SYAMS (SEQ ID NO: 212); a VH CDR2 sequence comprising SSIWRNGIVTVYADS (SEQ ID NO: 246); and a VH CDR3 sequence comprising WSAAFDY (SEQ ID NO: 235).

[0056] The disclosure also provides activatable antibodies that include an antibody or antigen-binding fragment thereof that specifically binds PDL1 coupled to a masking moiety (MM), such that coupling of the MM reduces the ability of the antibody or antigen-binding fragment thereof to bind PDL1. In some embodiments, the MM is coupled via a sequence that includes a substrate for a protease, for example, a protease that is active in diseased tissue and/or a protease that is co-localized with PDL1 at a treatment site in a subject. The activatable anti-PDL1 antibodies provided herein, also referred to herein as anti-PDL1 activatable antibodies or PDL1 activatable antibodies, are stable in circulation, activated at intended sites of therapy and/or diagnosis but not in normal, e.g., healthy tissue or other tissue not targeted for treatment and/or diagnosis, and, when activated, exhibit binding to PDL1 that is at least comparable to the corresponding, unmodified antibody.

[0057] In some embodiments, the activatable antibody that, in an activated state, specifically binds to mammalian PDL1, includes an antibody or an antigen binding fragment thereof (AB) that specifically binds to mammalian PDL1; a masking moiety (MM) that inhibits the binding of the AB to mammalian PDL1 when the activatable antibody is in an uncleaved state; and a cleavable moiety (CM) coupled to the AB, wherein the CM is a polypeptide that functions as a substrate for a protease.

[0058] In some embodiments, the activatable antibody that, in an activated state, has one or more of the following characteristics: (a) specifically binds to mammalian PDL1; and (b) specifically blocks a natural ligand of PDL1 from binding to the mammalian PDL1, wherein the activatable antibody comprises: an antibody or an antigen binding fragment thereof (AB) that specifically binds to mammalian PDL1; a masking moiety (MM) that inhibits the binding of the AB to mammalian PDL1 when the activatable antibody is in an uncleaved state; and a cleavable moiety (CM) coupled to the AB, wherein the CM is a polypeptide that functions as a substrate for a protease.

[0059] In some embodiments, the activatable antibody in an uncleaved state specifically binds to the mammalian PDL1 with a dissociation constant less than or equal to 1 nM, less than or equal to 2 nM, less than or equal to 3 nM, less than or equal to 4 nM, less than or equal to 5 nM, less than or equal to 10 nM, less than or equal to 15 nM, less than or equal to 20 nM, and/or less than or equal to 25 nM.

[0060] In some embodiments, the activatable antibody in an uncleaved state specifically binds to the mammalian PDL1 with a dissociation constant greater than or equal to 1 nM, greater than or equal to 2 nM, greater than or equal to 3 nM, greater than or equal to 4 nM, greater than or equal to 5 nM, greater than or equal to 10 nM, greater than or equal to 15 nM, greater than or equal to 20 nM, and/or greater than or equal to 25 nM.

[0061] In some embodiments, the activatable antibody in an uncleaved state specifically binds to the mammalian PDL1 with a dissociation constant in the range of 1 to 2 nM, 1 to 5 nM, 1 to 10 nM, 1 to 15 nM, 1 to 20 nM, 1 to 25 nM, 2 nM to 5 nM, 2 nM to 10 nM, 2 nM to 15 nM, 2 to 20 nM, 2 to 25 nM, 5 nM to 10 nM, 5 nM to 15 nM, 5 to 20 nM, 5 to 25 nM, 10 nM to 15 nM, 10 to 20 nM, 10 to 25 nM, 15 to 20 nM, 15 to 25 nM, or 20 to 25 nM.

[0062] In some embodiments, the activatable antibody in an activated state specifically binds to the mammalian PDL1 with a dissociation constant is less than or equal to 0.01 nM, less than or equal to 0.05 nM, less than or equal to 0.1 nM, less than or equal to 0.2 nM, less than or equal to 0.3 nM, less than or equal to 0.4 nM, less than or equal to 0.5 nM, less than or equal to 0.75 nM, and less than or equal to 1 nM.

[0063] In some embodiments, the activatable antibody in an activated state specifically binds to the mammalian PDL1 with a dissociation constant in the range of 0.01 nM to 1 nM, 0.05 nM to 1 nM, 0.1 nM to 1 nM, 0.2 nM to 1 nM, 0.3 nM to 1 nM, 0.4 nM to 1 nM, 0.5 nM to 1 nM, 0.75 nM to 1 nM, 0.01 nM to 0.75 nM, 0.05 nM to 0.75 nM, 0.1 nM to 0.75 nM, 0.2 nM to 0.75 nM, 0.3 nM to 0.75 nM, 0.4 nM to 0.75 nM, 0.5 nM to 0.75 nM, 0.01 nM to 0.5 nM, 0.05 nM to 0.5 nM, 0.1 nM to 0.5 nM, 0.2 nM to 0.5 nM, 0.3 nM to 0.5 nM, 0.4 nM to 0.5 nM, 0.01 nM to 0.4 nM, 0.05 nM to 0.4 nM, 0.1 nM to 0.4 nM, 0.2 nM to 0.4 nM, 0.3 nM to 0.4 nM, 0.01 nM to 0.3 nM, 0.05 nM to 0.3 nM, 0.1 nM to 0.3 nM, 0.2 nM to 0.3 nM, 0.01 nM to 0.2 nM, 0.05 nM to 0.2 nM, 0.1 nM to 0.2 nM, 0.01 nM to 0.1 nM, 0.05 nM to 0.1 nM, or 0.01 nM to 0.05 nM.

[0064] In some embodiments, the AB specifically binds to the mammalian PDL1 with a dissociation constant is less than or equal to 0.01 nM, less than or equal to 0.05 nM, less than or equal to 0.1 nM, less than or equal to 0.2 nM, less than or equal to 0.3 nM, less than or equal to 0.4 nM, less than or equal to 0.5 nM, less than or equal to 0.75 nM, and less than or equal to 1 nM.

[0065] In some embodiments, the AB specifically binds to the mammalian PDL1 with a dissociation constant in the range of 0.01 nM to 1 nM, 0.05 nM to 1 nM, 0.1 nM to 1 nM, 0.2 nM to 1 nM, 0.3 nM to 1 nM, 0.4 nM to 1 nM, 0.5 nM to 1 nM, 0.75 nM to 1 nM, 0.01 nM to 0.75 nM, 0.05 nM to 0.75 nM, 0.1 nM to 0.75 nM, 0.2 nM to 0.75 nM, 0.3 nM to 0.75 nM, 0.4 nM to 0.75 nM, 0.5 nM to 0.75 nM, 0.01 nM to 0.5 nM, 0.05 nM to 0.5 nM, 0.1 nM to 0.5 nM, 0.2 nM to 0.5 nM, 0.3 nM to 0.5 nM, 0.4 nM to 0.5 nM, 0.01 nM to 0.4 nM, 0.05 nM to 0.4 nM, 0.1 nM to 0.4 nM, 0.2 nM to 0.4 nM, 0.3 nM to 0.4 nM, 0.01 nM to 0.3 nM, 0.05 nM to 0.3 nM, 0.1 nM to 0.3 nM, 0.2 nM to 0.3 nM, 0.01 nM to 0.2 nM, 0.05 nM to 0.2 nM, 0.1 nM to 0.2 nM, 0.01 nM to 0.1 nM, 0.05 nM to 0.1 nM, or 0.01 nM to 0.05 nM.

[0066] In some embodiments, the mammalian PDL1 is selected from the group consisting of a human PDL1, a murine PDL1, a rat PDL1, and a cynomolgus monkey PDL1. In some embodiments, the AB specifically binds to human PDL1, murine PDL1 or cynomolgus monkey PDL1 with a dissociation constant of less than 1 nM. In some embodiments, the mammalian PDL1 is a human PDL1.

[0067] In some embodiments, the AB has one or more of the following characteristics: (a) the AB specifically binds to human PDL1 and murine PDL1; (b) the AB specifically binds to human PDL1 and cynomolgus monkey PDL1; and (c) the AB specifically binds to human PDL1, murine PDL1, and cynomolgus monkey PDL1.

[0068] In some embodiments, the AB has one or more of the following characteristics: (a) the AB specifically binds human PDL1, murine PDL1, and cynomolgus monkey PDL1; (b) the AB inhibits binding of human B7-1 and human PD1 to human PDL1; (c) the AB inhibits binding of murine B7-1 and murine PD1 to murine PDL1; and (d) the AB inhibits binding of cynomolgus monkey B7-1 and cynomolgus monkey PD1 to cynomolgus monkey PDL1.

[0069] In some embodiments, the AB blocks the ability of a natural ligand to bind to the mammalian PDL1 with an EC₅₀ less than or equal to 0.5 nM, less than or equal to 1 nM, less than or equal to 2 nM, less than or equal to 3 nM, less than or equal to 4 nM, less than or equal to 5 nM, less than or equal to 6 nM, less than or equal to 7 nM, less than or equal to 8 nM, less than or equal to 9 nM, and/or less than or equal to 10 nM.

[0070] In some embodiments, the AB blocks the ability of a natural ligand to bind to the mammalian PDL1 with an EC₅₀ of 0.5 nM to 10 nM, 0.5 nM to 5 nM, 0.5 nM to 3 nM, 0.5 nM to 2 nM, 0.5 nM to 1 nM, 1 nM to 10 nM, 1 nM to 5 nM, 1 nM to 3 nM, 1 nM to 2 nM, 2 nM to 10 nM, 2 nM to 5 nM, 2 nM to 3 nM, 3 nM to 10 nM, 3 nM to 5 nM, or 5 nM to 10 nM.

[0071] In some embodiments, natural ligand is a mammalian PD1. In some embodiments, the natural ligand is selected from the group consisting of: a human PD1, a murine PD1, and a cynomolgus monkey PD1.

[0072] In some embodiments, the natural ligand is a mammalian B7-1. In some embodiments, the natural ligand is selected from the group consisting of: a human B7-1, a murine B7-1, and a cynomolgus monkey B7-1.

[0073] In some embodiments, the activatable antibody has one or more of the following characteristics (a) the AB induces type 1 diabetes in a non-obese diabetic (NOD) mouse; and (b) the activatable antibody in an uncleaved state inhibits the induction of type 1 diabetes in a NOD mouse.

[0074] In some embodiments, the activatable antibody inhibits the induction of type 1 diabetes in the NOD mouse after administration of the activatable antibody at a single dose of 0.1 mg/kg to 3 mg/kg, 0.5 mg/kg to 3 mg/kg, 1 mg/kg to 3 mg/kg, 2 mg/kg to 3 mg/kg, 0.1 mg/kg to 2 mg/kg, 0.5 mg/kg to 2 mg/kg, 1 mg/kg to 2 mg/kg, 0.1 mg/kg to 1 mg/kg, 0.5 mg/kg to 1 mg/kg, or 0.1 mg/kg to 0.5 mg/kg.

[0075] In some embodiments, the activatable antibody induces type 1 diabetes in a subject after administration of the activatable antibody at a single dose of 1 mg/kg. In some embodiments, the subject is a NOD mouse.

[0076] In some embodiments, the activatable antibody induces type 1 diabetes in a subject after administration of the activatable antibody at single dose less than or equal to 3 mg/kg, less than or equal to 2 mg/kg, less than or equal to 1 mg/kg, less than or equal to 0.5 mg/kg, and/or less than or equal to 0.1 mg/kg.

[0077] In some embodiments, the activatable antibody induces type 1 diabetes in a subject after administration of the activatable antibody at single dose in the range selected from the group consisting of 0.1 mg/kg to 3 mg/kg, 0.5 mg/kg to 3 mg/kg, 1 mg/kg to 3 mg/kg, 2 mg/kg to 3 mg/kg, 0.1 mg/kg to 2 mg/kg, 0.5 mg/kg to 2 mg/kg, 1 mg/kg to 2 mg/kg, 0.1 mg/kg to 1 mg/kg, 0.5 mg/kg to 1 mg/kg, and 0.1 mg/kg to 0.5 mg/kg. In some embodiments, the subject is a NOD mouse.

[0078] In some embodiments, the activatable antibody has one or more of the following characteristics (a) the activatable antibody in an uncleaved state does not induce type 1 diabetes in greater than 50% of a population of non-obese diabetic (NOD) mice, and the AB induces type 1 diabetes in greater than 50% of a population of NOD mice.

[0079] In some embodiments, the activatable antibody does not induce type 1 diabetes in greater than 50% of the population of NOD mice after administration to each mouse in the population a single dose less than or equal to 3 mg/kg, less than or equal to 2 mg/kg, less than or equal to 1 mg/kg, less than or equal to 0.5 mg/kg, and/or less than or equal to 0.1 mg/kg.

[0080] In some embodiments, the activatable antibody does not induce type 1 diabetes in greater than 50% of the population of NOD mice after administration to each mouse in the population a single dose of the activatable antibody at a dosage of: 0.1 mg/kg to 3 mg/kg, 0.5 mg/kg to 3 mg/kg, 1 mg/kg to 3 mg/kg, 2 mg/kg to 3 mg/kg, 0.1 mg/kg to 2 mg/kg, 0.5 mg/kg to 2 mg/kg, 1 mg/kg to 2 mg/kg, 0.1 mg/kg to 1 mg/kg, 0.5 mg/kg to 1 mg/kg, or 0.1 mg/kg to 0.5 mg/kg.

[0081] In some embodiments, the activatable antibody has one or more of the following characteristics (a) the activatable antibody in an uncleaved state does not induce type 1 diabetes in greater than 50% of a population of non-obese diabetic (NOD) mice when administered at a single dose of 1 mg/kg, and (b) the AB induces type 1 diabetes in greater than 50% of a population of NOD mice, when administered at a single dose of 1 mg/kg.

[0082] In some embodiments, the AB induces type 1 diabetes in greater than 50% of the population of the NOD mice after administration to each mouse in the population a single dose of the AB at a dosage less than or equal to 3 mg/kg, less than or equal to 2 mg/kg, less than or equal to 1 mg/kg, less than or equal to 0.5 mg/kg, and/or less than or equal to 0.1 mg/kg.

[0083] In some embodiments, the AB induces type 1 diabetes in greater than 50% of the population of the NOD mice after administration to each mouse in the population a single dose of the AB at a dosage of: 0.1 mg/kg to 3 mg/kg, 0.5 mg/kg to 3 mg/kg, 1 mg/kg to 3 mg/kg, 2 mg/kg to 3 mg/kg, 0.1 mg/kg to 2 mg/kg, 0.5 mg/kg to 2 mg/kg, 1 mg/kg to 2 mg/kg, 0.1 mg/kg to 1 mg/kg, 0.5 mg/kg to 1 mg/kg, or 0.1 mg/kg to 0.5 mg/kg.

[0084] In some embodiments, he NOD mouse is a female NOD/ShiLtJ mouse substrain.

[0085] In some embodiments, the activatable antibody inhibits the induction of type 1 diabetes in a NOD mouse by at least 3-fold compared to the AB.

[0086] In some embodiments, the activatable antibody exhibits a safety margin that is at least a three-fold safety margin relative to the AB.

[0087] In some embodiments, the activatable antibody in an uncleaved state binds to a smaller percentage of a population of peripheral blood CD4+ CD8+ T lymphocytes than does the AB.

[0088] In some embodiments, the activatable antibody does not bind to greater than 500, of the population of peripheral blood CD4+ CD8+ T lymphocytes after administration of a single dose of the activatable antibody at a dosage less than or equal to 5 mg/kg, less than or equal to 4 mg/kg, less than or equal to 3 mg/kg, less than or equal to 2 mg/kg, less than or equal to 1 mg/kg, less than or equal to 0.5 mg/kg, and/or less than or equal to 0.1 mg/kg.

[0089] In some embodiments, the activatable antibody does not bind to greater than 50% of the population of peripheral blood CD4+ CD8+ T lymphocytes after administration of a single dose of the activatable antibody at a dosage of: 0.1 mg/kg to 5 mg/kg, 0.5 mg/kg to 5 mg/kg, 1 mg/kg to 5 mg/kg, 2 mg/kg to 5 mg/kg, 3 mg/kg to 5 mg/kg, 0.1 mg/kg to 3 mg/kg, 0.5 mg/kg to 3 mg/kg, 1 mg/kg to 3 mg/kg, 2 mg/kg to 3 mg/kg, 0.1 mg/kg to 2 mg/kg, 0.5 mg/kg to 2 mg/kg, 1 mg/kg to 2 mg/kg, 0.1 mg/kg to 1 mg/kg, 0.5 mg/kg to 1 mg/kg, or 0.1 mg/kg to 0.5 mg/kg.

[0090] In some embodiments, the AB binds to greater than 50% of the population of peripheral blood CD4+ CD8+ T lymphocytes after administration of a single dose of the AB at a dosage of: 0.1 mg/kg to 5 mg/kg, 0.5 mg/kg to 5 mg/kg, 1 mg/kg to 5 mg/kg, 2 mg/kg to 5 mg/kg, 3 mg/kg to 5 mg/kg, 0.1 mg/kg to 3 mg/kg, 0.5 mg/kg to 3 mg/kg, 1 mg/kg to 3 mg/kg, 2 mg/kg to 3 mg/kg, 0.1 mg/kg to 2 mg/kg, 0.5 mg/kg to 2 mg/kg, 1 mg/kg to 2 mg/kg, 0.1 mg/kg to 1 mg/kg, 0.5 mg/kg to 1 mg/kg, or 0.1 mg/kg to 0.5 mg/kg.

[0091] In some embodiments, the peripheral blood CD4+ CD8+ T lymphocytes are murine. In some embodiments, the murine peripheral blood CD4+ CD8+ T lymphocytes are derived from a tumor-bearing mouse.

[0092] In some embodiments, the percentage of the population of peripheral blood CD4+ CD8+ T lymphocytes to which the AB binds is less than 60% when the activatable antibody is administered at a dose between 1 mg/kg and 5 mg/kg. In some embodiments, the percentage of the population of peripheral blood CD4+ CD8+ T lymphocytes to which the AB binds is less than 50% when the activatable antibody is administered at a dose between 1 mg/kg and 5 mg/kg. In some embodiments, the percentage of the population of peripheral blood CD4+ CD8+ T lymphocytes to which the AB binds is between 30 and 60% when the activatable antibody is administered at a dose between 1 mg/kg and 5 mg/kg. In some embodiments, the percentage of the population of peripheral blood CD4+ CD8+ T lymphocytes to which the AB binds is between 30 and 50% when the activatable antibody is administered at a dose between 1 mg/kg and 5 mg/kg.

[0093] The invention also provides methods of treating, preventing and/or delaying the onset or progression of, or alleviating a symptom associated with aberrant expression and/or activity of PDL1 in a subject using activatable antibodies that bind PDL1, particularly activatable antibodies that bind and neutralize or otherwise inhibit at least one biological activity of PDL1 and/or PDL1-mediated signaling.

[0094] The activatable antibodies in an activated state bind PDL1 and include (i) an antibody or an antigen binding fragment thereof (AB) that specifically binds to PDL1; (ii) a masking moiety (MM) that, when the activatable antibody is in an uncleaved state, inhibits the binding of the AB to PDL1; and (c) a cleavable moiety (CM) coupled to the AB, wherein the CM is a polypeptide that functions as a substrate for a protease.

[0095] In some embodiments, the activatable antibody in the uncleaved state has the structural arrangement from N-terminus to C-terminus as follows: MM-CM-AB or AB-CM-MM.

[0096] In some embodiments, the activatable antibody comprises a linking peptide between the MM and the CM.

[0097] In some embodiments, the activatable antibody comprises a linking peptide between the CM and the AB.

[0098] In some embodiments, the activatable antibody comprises a first linking peptide (LP1) and a second linking peptide (LP2), and wherein the activatable antibody in the uncleaved state has the structural arrangement from N-terminus to C-terminus as follows: MM-LP1-CM-LP2-AB or AB-LP2-CM-LP1-MM. In some embodiments, the two linking peptides need not be identical to each other.

[0099] In some embodiments, at least one of LP1 or LP2 comprises an amino acid sequence selected from the group consisting of (GS)ₙ, (GGS)ₙ, (GSGGS)ₙ (SEQ ID NO: 191) and (GGGS)ₙ (SEQ ID NO: 192), where n is an integer of at least one.

[0100] In some embodiments, at least one of LP1 or LP2 comprises an amino acid sequence selected from the group consisting of GGSG (SEQ ID NO: 193), GGSGG (SEQ ID NO: 194), GSGSG (SEQ ID NO: 195), GSGGG (SEQ ID NO: 196), GGGSG (SEQ ID NO: 197), and GSSSG (SEQ ID NO: 198).

[0101] In some embodiments, LP1 comprises the amino acid sequence GSSGGSGGSGGSG (SEQ ID NO: 199), GSSGGSGGSGG (SEQ ID NO: 200), GSSGGSGGSGGS (SEQ ID NO: 201), GSSGGSGGSGGSGGGS (SEQ ID NO: 202), GSSGGSGGSG (SEQ ID NO: 203), or GSSGGSGGSGS (SEQ ID NO: 204).

[0102] In some embodiments, LP2 comprises the amino acid sequence GSS, GGS, GGGS (SEQ ID NO: 205), GSSGT (SEQ ID NO: 206) or GSSG (SEQ ID NO: 207).

[0103] In some embodiments, the AB has a dissociation constant of about 100 nM or less for binding to PDL1.

[0104] In some embodiments, the activatable antibody includes an antibody or antigen-binding fragment thereof (AB) that specifically binds PDL1. In some embodiments, the antibody or antigen binding fragment thereof that binds PDL1 is a monoclonal antibody, domain antibody, single chain, Fab fragment, a F(ab′)₂ fragment, a scFv, a scAb, a dAb, a single domain heavy chain antibody, or a single domain light chain antibody. In some embodiments, such an antibody or antigen binding fragment thereof that binds PDL1 is a mouse, other rodent, chimeric, humanized or fully human monoclonal antibody.

[0105] In some embodiments, the activatable antibody comprises a heavy chain amino acid sequence selected from the group consisting of SEQ ID NO: 14, 16, 18, 20, 22, 24, 26, 28, 30, 32, 34, 36, 38, 40, 42, 44, 46, 48, 50, 52, 54, and 56. In some embodiments, the activatable antibody comprises a light chain amino acid sequence comprising SEQ ID NO: 12 or SEQ ID NO: 58. In some embodiments, the activatable antibody comprises a light chain amino acid sequence comprising SEQ ID NO: 12. In some embodiments, the activatable antibody comprises a light chain amino acid sequence comprising SEQ ID NO: 58.

[0106] In some embodiments, the activatable antibody comprises a heavy chain amino acid sequence comprising an amino acid sequence selected from the group consisting of SEQ ID NO: 46, 48, 50, 52, 54, and 56, and a light chain amino acid sequence comprising SEQ ID NO: 58.

[0107] In some embodiments, the activatable antibody comprises a heavy chain amino acid sequence comprising an amino acid sequence selected from the group consisting of SEQ ID NO: 46, 48, 50, 52, 54, and 56, and a light chain amino acid sequence comprising SEQ ID NO: 12.

[0108] In some embodiments, the activatable antibody comprises a heavy chain amino acid sequence that is at least 90%, 91%, 92%, 93%, 94%, 95%, 96%, 97%, 98% or 99% identical to an amino acid sequence selected from the group consisting of SEQ ID NO: 14, 16, 18, 20, 22, 24, 26, 28, 30, 32, 34, 36, 38, 40, 42, 44, 46, 48, 50, 52, 54, and 56. In some embodiments, the activatable antibody comprises a light chain amino acid that is at least 90%, 91%, 92%, 93%, 94%, 95%, 96%, 97%, 98% or 99% identical to the amino acid sequence of SEQ ID NO: 58. In some embodiments, the activatable antibody comprises a light chain amino acid that is at least 90%, 91%, 92%, 93%, 94%, 958%, 96%, 97%, 98% or 99% identical to the amino acid sequence of SEQ ID NO: 12. In some embodiments, the activatable antibody comprises a heavy chain amino acid sequence that is at least 90%, 91%, 92%, 93%, 94%, 95%, 96%, 97%, 98% or 99% identical to an amino acid sequence selected from the group consisting of SEQ ID NO: 46, 48, 50, 52, 54, and 56, and a light chain amino acid that is at least 90%, 91%, 92%, 93%, 94%, 95%, 96%, 97%, 98% or 99% identical to the amino acid sequence of SEQ ID NO: 58. In some embodiments, the activatable antibody comprises a heavy chain amino acid sequence that is at least 90%, 91%, 92%, 93%, 94%, 95%, 96%, 97%, 98% or 99% identical to an amino acid sequence selected from the group consisting of SEQ ID NO: 46, 48, 50, 52, 54, and 56, and a light chain amino acid that is at least 90%, 91%, 92%, 93%, 94%, 95%, 96%, 97%, 98% or 99% identical to the amino acid sequence of SEQ ID NO: 12.

[0109] In some embodiments, the AB of the activatable anti-PDL1 antibody comprises a heavy chain amino acid sequence selected from the group consisting of the heavy chain sequences shown in Table 15. In some embodiments, the AB of the activatable anti-PDL1 antibody comprises a light chain amino acid sequence selected from the group consisting of the light chain sequences shown in Table 15. In some embodiments, the AB of the activatable anti-PDL1 antibody comprises a heavy chain amino acid sequence selected from the group consisting of the heavy chain sequences shown in Table 15 and a light chain amino acid sequence selected from the group consisting of the light chain sequences shown in Table 15.

[0110] In some embodiments, the AB of the activatable anti-PDL1 antibody comprises a heavy chain amino acid sequence that is at least 90%, 91%, 92%, 93%, 94%, 95%, 96.0%, 97%, 98% or 99% identical to an amino acid sequence selected from the group consisting of the heavy chain sequences shown in Table 15. In some embodiments, the AB of the activatable anti-PDL1 antibody comprises a light chain amino acid sequence that is at least 90%, 91%, 92%, 93%, 94%, 95%, 96%, 97%, 98% or 99% identical to an amino acid sequence selected from the group consisting of the light chain sequences shown in Table 15. In some embodiments, the AB of the activatable anti-PDL1 antibody comprises a heavy chain amino acid sequence that is at least 90%, 91%, 92%, 93%, 94%, 95%, 96%, 97%, 98% or 99% identical to an amino acid sequence selected from the group consisting of the heavy chain sequences shown in Table 15 and a light chain amino acid sequence that is at least 90%, 91%, 92%, 93%, 94%, 95%, 96%, 97%, 98% or 99% identical to an amino acid sequence selected from the group consisting of the light chain sequences shown in Table 15.

[0111] In some embodiments, the activatable antibody comprises a combination of a variable heavy chain complementarity determining region 1 (VH CDR1, also referred to herein as CDRH1) sequence, a variable heavy chain complementarity determining region 2 (VH CDR2, also referred to herein as CDRH2) sequence, a variable heavy chain complementarity determining region 3 (VH CDR3, also referred to herein as CDRH3) sequence, a variable light chain complementarity determining region 1 (VL CDR1, also referred to herein as CDRL1) sequence, a variable light chain complementarity determining region 2 (VL CDR2, also referred to herein as CDRL2) sequence, and a variable light chain complementarity determining region 3 (VL CDR3, also referred to herein as CDRL3) sequence, wherein at least one CDR sequence is selected from the group consisting of a VH CDR1 sequence shown in Table 16, a VH CDR2 sequence shown in Table 16; a VH CDR3 sequence shown in Table 16; a VL CDR1 sequence shown in Table 16, a VL CDR2 sequence shown in Table 16; and a VL CDR3 sequence shown in Table 16.

[0112] In some embodiments, the activatable antibody comprises a combination of a VH CDR1 sequence, a VH CDR2 sequence, a VH CDR3 sequence, a VL CDR1 sequence, a VL CDR2 sequence, and a VL CDR3 sequence, wherein at least one CDR sequence is selected from the group consisting of a VH CDR1 sequence that includes a sequence that is at least 90%, 91%, 92%, 93%, 94%, 95%, 96%, 97%, 98%, 99% or more identical to a VH CDR1 sequence shown in Table 16; a VH CD2 sequence that includes a sequence that is at least 90%, 91%, 92%, 93%, 94%, 95%, 96%, 97%, 98%, 99% or more identical to a VH CDR2 sequence shown in Table 16; a VH CDR3 sequence that includes a sequence that is at least 90%, 91%, 92%, 93%, 94%, 95%, 96%, 97%, 98%, 99% or more identical to a VH CDR3 sequence shown in Table 16; a VL CDR1 sequence that includes a sequence that is at least 90%, 91%, 92%, 93%, 94%, 95%, 96%, 97%, 98%, 99% or more identical to a VL CDR1 sequence shown in Table 16; a VL CDR2 sequence that includes a sequence that is at least 90%, 91%, 92%, 93%, 94%, 95%, 96%, 97%, 98%, 99% or more identical to a VL CDR2 sequence shown in Table 16; and a VL CDR3 sequence that includes a sequence that is at least 90%, 91%, 92%, 93%, 94%, 95%, 96%, 97%, 98%, 99% or more identical to a VL CDR3 sequence shown in Table 16.

[0113] In some embodiments, the activatable antibody comprises a combination of a VH CDR1 sequence, a VH CDR2 sequence, a VH CDR3 sequence, a VL CDR1 sequence, a VL CDR2 sequence, and a VL CDR3 sequence, wherein the combination is a combination of the six CDR sequences (VH CDR1, VH CDR2, VH CDR3, VL CDR1, VL CDR2, and VL CDR3) shown in a single row in Table 16.

[0114] In some embodiments, the activatable antibody comprises a heavy chain that comprise a combination of a VH CDR1 sequence, a VH CDR2 sequence, and a VH CDR3 sequence, wherein the combination is a combination of the three heavy chain CDR sequences (VH CDR1, VH CDR2, VH CDR3) shown in a single row in Table 16.

[0115] In some embodiments, the activatable antibody comprises a combination of a VH CDR1 sequence, a VH CDR2 sequence, a VH CDR3 sequence, a VL CDR1 sequence, a VL CDR2 sequence, and a VL CDR3 sequence, wherein each CDR sequence in the combination comprises a sequence that is at least 90%, 91%, 92%, 93%, 94%, 95%, 96%, 97%, 98%, 99% or more identical to the corresponding CDR sequence in a combination of the six CDR sequences (VH CDR1, VH CDR2, VH CDR3, VL CDR1, VL CDR2, and VL CDR3) shown in a single row in Table 16.

[0116] In some embodiments, the activatable antibody comprises a heavy chain that comprise a combination of a VH CDR1 sequence, a VH CDR2 sequence, and a VH CDR3 sequence, wherein each CDR sequence in the combination comprises a sequence that is at least 90%, 91%, 92%, 93%, 94%, 95%, 96%, 97%, 98%, 99% or more identical to the corresponding CDR sequence in a combination of three heavy chain CDR sequences (VH CDR1, VH CDR2, VH CDR3) shown in a single row in Table 16.

[0117] In some embodiments, the activatable antibody comprises a combination of a VH CDR1 sequence, a VH CDR2 sequence, a VH CDR3 sequence, a VL CDR1 sequence, a VL CDR2 sequence, and a VL CDR3 sequence, wherein at least one CDR sequence is selected from the group consisting of a VL CDR1 sequence comprising RASQSISSYLN (SEQ ID NO: 209); a VL CDR2 sequence comprising AASSLQS (SEQ ID NO: 215); a VL CDR3 sequence comprising DNGYPST (SEQ ID NO: 228); a VH CDR1 sequence comprising SYAMS (SEQ ID NO: 212); a VH CDR2 sequence comprising SSIWRNGIVTVYADS (SEQ ID NO: 246); and a VH CDR3 sequence comprising WSAAFDY (SEQ ID NO: 235).

[0118] In some embodiments, the activatable antibody comprises a combination of a VH CDR1 sequence, a VH CDR2 sequence, a VH CDR3 sequence, a VL CDR1 sequence, a VL CDR2 sequence, and a VL CDR3 sequence, wherein the VH CDR2 sequence comprises SSIWRNGIVTVYADS (SEQ ID NO: 246). In some embodiments, the activatable antibody comprises a combination of a VH CDR1 sequence, a VH CDR2 sequence, a VH CDR3 sequence, a VL CDR1 sequence, a VL CDR2 sequence, and a VL CDR3 sequence, wherein the VH CDR3 sequence comprises WSAAFDY (SEQ ID NO: 235). In some embodiments, the activatable antibody comprises a combination of a VH CDR1 sequence, a VH CDR2 sequence, a VH CDR3 sequence, a VL CDR1 sequence, a VL CDR2 sequence, and a VL CDR3 sequence, wherein the VH CDR2 sequence comprises SSIWRNGIVTVYADS (SEQ ID NO: 246), and the VH CDR3 sequence comprises WSAAFDY (SEQ ID NO: 235).

[0119] In some embodiments, the activatable antibody comprises a combination of a VH CDR1 sequence, a VH CDR2 sequence, a VH CDR3 sequence, a VL CDR1 sequence, a VL CDR2 sequence, and a VL CDR3 sequence, wherein the combination comprises a VL CDR1 sequence comprising RASQSISSYLN (SEQ ID NO: 209); a VL CDR2 sequence comprising AASSLQS (SEQ ID NO: 215); a VL CDR3 sequence comprising DNGYPST (SEQ ID NO: 228); a VH CDR1 sequence comprising SYAMS (SEQ ID NO: 212); a VH CDR2 sequence comprising SSIWRNGIVTVYADS (SEQ ID NO: 246); and a VH CDR3 sequence comprising WSAAFDY (SEQ ID NO: 235).

[0120] In some embodiments, the activatable antibody comprises a combination of a variable heavy chain complementarity determining region 1 (VH CDR1, also referred to herein as CDRH1) sequence, a variable heavy chain complementarity determining region 2 (VH CDR2, also referred to herein as CDRH2) sequence, a variable heavy chain complementarity determining region 3 (VH CDR3, also referred to herein as CDRH3) sequence, a variable light chain complementarity determining region 1 (VL CDR1, also referred to herein as CDRL1) sequence, a variable light chain complementarity determining region 2 (VL CDR2, also referred to herein as CDRL2) sequence, and a variable light chain complementarity determining region 3 (VL CDR3, also referred to herein as CDRL3) sequence, wherein at least one CDR sequence is selected from the group consisting of a VH CDR1 sequence shown in Table 17; a VH CDR2 sequence shown in Table 17; a VH CDR3 sequence shown in Table 17; a VL CDR1 sequence shown in Table 17; a VL CDR2 sequence shown in Table 17; and a VL CDR3 sequence shown in Table 17.

[0121] In some embodiments, the activatable antibody comprises a combination of a VH CDR1 sequence, a VH CDR2 sequence, a VH CDR3 sequence, a VL CDR1 sequence, a VL CDR2 sequence, and a VL CDR3 sequence, wherein at least one CDR sequence is selected from the group consisting of a VH CDR1 sequence that includes a sequence that is at least 90%, 91%, 92%, 93%, 94%, 95%, 96%, 97%, 98%, 99% or more identical to a VH CDR1 sequence shown in Table 17; a VH CD2 sequence that includes a sequence that is at least 90%, 91%, 92%, 93%, 94%, 95%, 96%, 97%, 98%, 99% or more identical to a VH CDR2 sequence shown in Table 17; a VH CDR3 sequence that includes a sequence that is at least 90%, 91%, 92%, 93%, 94%, 95%, 96%, 97%, 98%, 99% or more identical to a VH CDR3 sequence shown in Table 17; a VL CDR1 sequence that includes a sequence that is at least 90%, 91%, 92%, 93%, 94%, 95%, 96%, 97%, 98%, 99% or more identical to a VL CDR1 sequence shown in Table 17; a VL CDR2 sequence that includes a sequence that is at least 90%, 91%, 92%, 93%, 94%, 95%, 96%, 97%, 98%, 99% or more identical to a VL CDR2 sequence shown in Table 17; and a VL CDR3 sequence that includes a sequence that is at least 90%, 91%, 92%, 93%, 94%, 95%, 96%, 97%, 98%, 99% or more identical to a VL CDR3 sequence shown in Table 17.

[0122] In some embodiments, the activatable antibody comprises a combination of a VH CDR1 sequence, a VH CDR2 sequence, a VH CDR3 sequence, a VL CDR1 sequence, a VL CDR2 sequence, and a VL CDR3 sequence, wherein the combination is a combination shown in Table 17.

[0123] In some embodiments, the activatable antibody comprises a combination of a VH CDR1 sequence, a VH CDR2 sequence, a VH CDR3 sequence, a VL CDR1 sequence, a VL CDR2 sequence, and a VL CDR3 sequence, wherein each CDR sequence in the combination comprises a sequence that is at least 90%, 91%, 92%, 93%, 94%, 95%, 96%, 97%, 98%, 99% or more identical to the corresponding CDR sequence in a combination shown in Table 17.

[0124] In some embodiments, the activatable antibody comprises an amino acid sequence selected from the group consisting of SEQ ID NOs: 83, 85, 87, 89, 91, 93, 95, 97, 99, 101, 103, 105, 107, 109, 111, 113, 115, 117, 119, 121, 123, 125, 127, 129, 131, 133, 135, 137, 139, 141, 143, 145, 147, 149, 151, 153, 155, 157, 931, 933, 935, 937, 939, 941, 943, 945, 947, 949, 951, 953, 955, 957, 959, 961, 963, 965, 967, 969, 971, 973, 975, 977, 979, 981, 983, 985, 987, 989, 991, 993, 995, 997, 999, 1001, 1003, 1005, 1144-1191, 1200, and 1201. In some embodiments, the activatable antibody comprises an amino acid sequence selected from the group consisting of SEQ ID NO: 46, 48, 50, 52, 54, and 56. In some embodiments, the activatable antibody comprises an amino acid sequence selected from the group consisting of SEQ ID NOs: 83, 85, 87, 89, 91, 93, 95, 97, 99, 101, 103, 105, 107, 109, 111, 113, 115, 117, 119, 121, 123, 125, 127, 129, 131, 133, 135, 137, 139, 141, 143, 145, 147, 149, 151, 153, 155, 157, 931, 933, 935, 937, 939, 941, 943, 945, 947, 949, 951, 953, 955, 957, 959, 961, 963, 965, 967, 969, 971, 973, 975, 977, 979, 981, 983, 985, 987, 989, 991, 993, 995, 997, 999, 1001, 1003, 1005, 1144-1191, 1200, and 1201, and an amino acid sequence selected from the group consisting of SEQ ID NO: 46, 48, 50, 52, 54, and 56.

[0125] In some embodiments, the activatable antibody comprises an amino acid sequence selected from the group consisting of SEQ ID NOs: 931, 933, 935, 937, 939, 941, 943, 945, 947, 949, 951, 953, 955, 957, 959, 961, 963, 965, 967, 969, 971, 973, 975, 977, 979, 981, 983, 985, 987, 989, 991, 993, 995, 997, 999, 1001, 1003, 1005, 1144-1191, 1200, and 1201. In some embodiments, the activatable antibody comprises an amino acid sequence selected from the group consisting of SEQ ID NO: 46, 48, 50, 52, 54, and 56. In some embodiments, the activatable antibody comprises an amino acid sequence selected from the group consisting of SEQ ID NOs: 931, 933, 935, 937, 939, 941, 943, 945, 947, 949, 951, 953, 955, 957, 959, 961, 963, 965, 967, 969, 971, 973, 975, 977, 979, 981, 983, 985, 987, 989, 991, 993, 995, 997, 999, 1001, 1003, 1005, 1144-1191, 1200, and 1201, and an amino acid sequence selected from the group consisting of SEQ ID NO: 46, 48, 50, 52, 54, and 56.

[0126] In some embodiments, the activatable antibody comprises an amino acid sequence selected from the group consisting of SEQ ID NOs: 931, 933, 935, 937, 939, 941, 943, 945, 947, 949, 951, 953, 955, 957, 959, 961, 963, 965, 967, 969, 971, 973, 975, 977, 979, 981, 983, 985, 987, 989, 991, 993, 995, 997, 999, 1001, 1003, 1005, 1145, 1147, 1149, 1151, 1153, 1155, 1157, 1159, 1161, 1163, 1165, 1167, 1169, 1171, 1173, 1175, 1177, 1179, 1181, 1183, 1185, 1187, 1189, 1191, and 1201. In some embodiments, the activatable antibody comprises an amino acid sequence selected from the group consisting of SEQ ID NO: 46, 48, 50, 52, 54, and 56. In some embodiments, the activatable antibody comprises an amino acid sequence selected from the group consisting of SEQ ID NOs: 931, 933, 935, 937, 939, 941, 943, 945, 947, 949, 951, 953, 955, 957, 959, 961, 963, 965, 967, 969, 971, 973, 975, 977, 979, 981, 983, 985, 987, 989, 991, 993, 995, 997, 999, 1001, 1003, 100, 1145, 1147, 1149, 1151, 1153, 1155, 1157, 1159, 1161, 1163, 1165, 1167, 1169, 1171, 1173, 1175, 1177, 1179, 1181, 1183, 1185, 1187, 1189, 1191, and 1201, and an amino acid sequence selected from the group consisting of SEQ ID NO: 46, 48, 50, 52, 54, and 56.

[0127] In some embodiments, the activatable antibody includes an amino acid that is at least 90%, 91%, 92%, 93%, 94%, 95%, 96%, 97%, 98% or 99% identical to an amino acid sequence selected from the group consisting of SEQ ID NOs: 83, 85, 87, 89, 91, 93, 95, 97, 99, 101, 103, 105, 107, 109, 111, 113, 115, 117, 119, 121, 123, 125, 127, 129, 131, 133, 135, 137, 139, 141, 143, 145, 147, 149, 151, 153, 155, 157, 931, 933, 935, 937, 939, 941, 943, 945, 947, 949, 951, 953, 955, 957, 959, 961, 963, 965, 967, 969, 971, 973, 975, 977, 979, 981, 983, 985, 987, 989, 991, 993, 995, 997, 999, 1001, 1003, 1005, 1144-1191, 1200, and 1201. In some embodiments, the activatable antibody includes an amino acid that is at least 90%, 91%, 92%, 93%, 94%, 95%, 96%, 97%, 98% or 99% identical to an amino acid sequence selected from the group consisting of SEQ ID NO: 46, 48, 50, 52, 54, and 56. In some embodiments, the activatable antibody includes an amino acid that is at least 90%, 91%, 92%, 93%, 94%, 95%, 96%, 97%, 98% or 99% identical to an amino acid sequence selected from the group consisting of SEQ ID NOs: 83, 85, 87, 89, 91, 93, 95, 97, 99, 101, 103, 105, 107, 109, 111, 113, 115, 117, 119, 121, 123, 125, 127, 129, 131, 133, 135, 137, 139, 141, 143, 145, 147, 149, 151, 153, 155, 157, 931, 933, 935, 937, 939, 941, 943, 945, 947, 949, 951, 953, 955, 957, 959, 961, 963, 965, 967, 969, 971, 973, 975, 977, 979, 981, 983, 985, 987, 989, 991, 993, 995, 997, 999, 1001, 1003, 1005, 1144-1191, 1200, and 1201, and an amino acid that is at least 90%, 91%, 92%, 93%, 94%, 95%, 96%, 97%, 98% or 99% identical to an amino acid sequence selected from the group consisting of SEQ ID NO: 46, 48, 50, 52, 54, and 56.

[0128] In some embodiments, the activatable antibody includes an amino acid that is at least 90%, 91%, 92%, 93%, 94%, 95%, 96%, 97%, 98% or 99% identical to an amino acid sequence selected from the group consisting of SEQ ID NOs: 931, 933, 935, 937, 939, 941, 943, 945, 947, 949, 951, 953, 955, 957, 959, 961, 963, 965, 967, 969, 971, 973, 975, 977, 979, 981, 983, 985, 987, 989, 991, 993, 995, 997, 999, 1001, 1003, 1005, 1144-1191, 1200, and 1201. In some embodiments, the activatable antibody includes an amino acid that is at least 90%, 91%, 92%, 93%, 94%, 95%, 96%, 97%, 98% or 99% identical to an amino acid sequence selected from the group consisting of SEQ ID NO: 46, 48, 50, 52, 54, and 56. In some embodiments, the activatable antibody includes an amino acid that is at least 90%, 91%, 92%, 93%, 94%, 95%, 96%, 97%, 98% or 99% identical to an amino acid sequence selected from the group consisting of SEQ ID NOs: 931, 933, 935, 937, 939, 941, 943, 945, 947, 949, 951, 953, 955, 957, 959, 961, 963, 965, 967, 969, 971, 973, 975, 977, 979, 981, 983, 985, 987, 989, 991, 993, 995, 997, 999, 1001, 1003, 1005, 1144-1191, 1200, and 1201, and an amino acid that is at least 90%, 91%, 92%, 93%, 94%, 95%, 96%, 97%, 98% or 99% identical to an amino acid sequence selected from the group consisting of SEQ ID NO: 46, 48, 50, 52, 54, and 56.

[0129] In some embodiments, the activatable antibody includes an amino acid that is at least 90%, 91%, 92%, 93%, 94%, 95%, 96%, 97%, 98% or 99% identical to an amino acid sequence selected from the group consisting of SEQ ID NOs: 931, 933, 935, 937, 939, 941, 943, 945, 947, 949, 951, 953, 955, 957, 959, 961, 963, 965, 967, 969, 971, 973, 975, 977, 979, 981, 983, 985, 987, 989, 991, 993, 995, 997, 999, 1001, 1003, 1005, 1145, 1147, 1149, 1151, 1153, 1155, 1157, 1159, 1161, 1163, 1165, 1167, 1169, 1171, 1173, 1175, 1177, 1179, 1181, 1183, 1185, 1187, 1189, 1191, 1200, and 1201. In some embodiments, the activatable antibody includes an amino acid that is at least 90%, 91%, 92%, 93%, 94%, 95%, 96%, 97%, 98% or 99% identical to an amino acid sequence selected from the group consisting of SEQ ID NO: 46, 48, 50, 52, 54, and 56. In some embodiments, the activatable antibody includes an amino acid that is at least 90%, 91%, 92%, 93%, 94%, 95%, 96%, 97%, 98% or 99% identical to an amino acid sequence selected from the group consisting of SEQ ID NOs: 931, 933, 935, 937, 939, 941, 943, 945, 947, 949, 951, 953, 955, 957, 959, 961, 963, 965, 967, 969, 971, 973, 975, 977, 979, 981, 983, 985, 987, 989, 991, 993, 995, 997, 999, 1001, 1003, 1005, 1145, 1147, 1149, 1151, 1153, 1155, 1157, 1159, 1161, 1163, 1165, 1167, 1169, 1171, 1173, 1175, 1177, 1179, 1181, 1183, 1185, 1187, 1189, 1191, and 1201, and an amino acid that is at least 90%, 91%, 92%, 93%, 94%, 95%, 96%, 97%, 98% or 99% identical to an amino acid sequence selected from the group consisting of SEQ ID NO: 46, 48, 50, 52, 54, and 56.

[0130] In some embodiments, the activatable antibody comprises an amino acid sequence selected from the group consisting of SEQ ID NOs: 83, 85, 87, 89, 91, 93, 95, 97, 99, 101, 103, 105, 107, 109, 111, 113, 115, 117, 119, 121, 123, 125, 127, 129, 131, 133, 135, 137, 139, 141, 143, 145, 147, 149, 151, 153, 155, 157, 931, 933, 935, 937, 939, 941, 943, 945, 947, 949, 951, 953, 955, 957, 959, 961, 963, 965, 967, 969, 971, 973, 975, 977, 979, 981, 983, 985, 987, 989, 991, 993, 995, 997, 999, 1001, 1003, 1005, 1144-1191, 1200, and 1201, and the heavy chain amino acid sequence of SEQ ID NO: 46.

[0131] In some embodiments, the activatable antibody comprises an amino acid sequence selected from the group consisting of SEQ ID NOs: 931, 933, 935, 937, 939, 941, 943, 945, 947, 949, 951, 953, 955, 957, 959, 961, 963, 965, 967, 969, 971, 973, 975, 977, 979, 981, 983, 985, 987, 989, 991, 993, 995, 997, 999, 1001, 1003, 1005, 1144-1191, 1200, and 1201, and the heavy chain amino acid sequence of SEQ ID NO: 46.

[0132] In some embodiments, the activatable antibody comprises an amino acid sequence selected from the group consisting of SEQ ID NOs: 931, 933, 935, 937, 939, 941, 943, 945, 947, 949, 951, 953, 955, 957, 959, 961, 963, 965, 967, 969, 971, 973, 975, 977, 979, 981, 983, 985, 987, 989, 991, 993, 995, 997, 999, 1001, 1003, 1005, 1145, 1147, 1149, 1151, 1153, 1155, 1157, 1159, 1161, 1163, 1165, 1167, 1169, 1171, 1173, 1175, 1177, 1179, 1181, 1183, 1185, 1187, 1189, 1191, and 1201, and the heavy chain amino acid sequence of SEQ ID NO: 46.

[0133] In some embodiments, the activatable antibody includes an amino acid that is at least 90%, 91%, 92%, 93%, 94%, 95%, 96%, 97%, 98% or 99% identical to an amino acid sequence selected from the group consisting of SEQ ID NOs: 83, 85, 87, 89, 91, 93, 95, 97, 99, 101, 103, 105, 107, 109, 111, 113, 115, 117, 119, 121, 123, 125, 127, 129, 131, 133, 135, 137, 139, 141, 143, 145, 147, 149, 151, 153, 155, 157, 931, 933, 935, 937, 939, 941, 943, 945, 947, 949, 951, 953, 955, 957, 959, 961, 963, 965, 967, 969, 971, 973, 975, 977, 979, 981, 983, 985, 987, 989, 991, 993, 995, 997, 999, 1001, 1003, 1005, 1144-1191, 1200, and 1201, and an amino acid that is at least 90%, 91%, 92%, 93%, 94%, 95%, 96%, 97%, 98% or 99% identical to the heavy chain amino acid sequence of SEQ ID NO: 46.

[0134] In some embodiments, the activatable antibody includes an amino acid that is at least 90%, 91%, 92%, 93%, 94%, 95%, 96%, 97%, 98% or 99% identical to an amino acid sequence selected from the group consisting of SEQ ID NOs: 931, 933, 935, 937, 939, 941, 943, 945, 947, 949, 951, 953, 955, 957, 959, 961, 963, 965, 967, 969, 971, 973, 975, 977, 979, 981, 983, 985, 987, 989, 991, 993, 995, 997, 999, 1001, 1003, 1005, 1144-1191, 1200, and 1201, and an amino acid that is at least 90%, 91%, 92%, 93%, 94%, 95%, 96%, 97%, 98% or 99% identical to the heavy chain amino acid sequence of SEQ ID NO: 46.

[0135] In some embodiments, the activatable antibody includes an amino acid that is at least 90%, 91%, 92%, 93%, 94%, 95, 96%, 97%, 98% or 99% identical to an amino acid sequence selected from the group consisting of SEQ ID NOs: 931, 933, 935, 937, 939, 941, 943, 945, 947, 949, 951, 953, 955, 957, 959, 961, 963, 965, 967, 969, 971, 973, 975, 977, 979, 981, 983, 985, 987, 989, 991, 993, 995, 997, 999, 1001, 1003, 1005, 1145, 1147, 1149, 1151, 1153, 1155, 1157, 1159, 1161, 1163, 1165, 1167, 1169, 1171, 1173, 1175, 1177, 1179, 1181, 1183, 1185, 1187, 1189, 1191, and 1201, and an amino acid that is at least 90%, 91%, 92%, 93%, 94%, 95%, 96%, 97%, 98% or 99% identical to the heavy chain amino acid sequence of SEQ ID NO: 46.

[0136] In some embodiments, the activatable antibody comprises the amino acid sequence of SEQ ID NO: 428. In some embodiments, the activatable antibody comprises an amino acid sequence selected from the group consisting of SEQ ID NO: 430, 432, 434, and 1202. In some embodiments, the activatable antibody comprises the amino acid sequence of SEQ ID NO: 428, and an amino acid sequence selected from the group consisting of SEQ ID NO: 430, 432, and 434.

[0137] In some embodiments, the activatable antibody comprises the amino acid sequence of SEQ ID NO: 1008. In some embodiments, the activatable antibody comprises an amino acid sequence selected from the group consisting of SEQ ID NO: 430, 432, 434, and 1202. In some embodiments, the activatable antibody comprises the amino acid sequence of SEQ ID NO: 1008, and an amino acid sequence selected from the group consisting of SEQ ID NO: 430, 432, 434, and 1202.

[0138] In some embodiments, the activatable antibody includes an amino acid that is at least 90%, 91%, 92%, 93%, 94%, 95%, 96%, 97%, 98% or 99% identical to the amino acid sequence of SEQ ID NO: 428. In some embodiments, the activatable antibody includes an amino acid that is at least 90%, 91%, 92%, 93%, 94%, 95%, 96%, 97%, 98% or 99% identical to an amino acid sequence selected from the group consisting of SEQ ID NO: 430, 432, 434, and 1202. In some embodiments, the activatable antibody includes an amino acid that is at least 90%, 91%, 92%, 93%, 94%, 95%, 96%, 97%, 98% or 99% identical to the amino acid sequence of SEQ ID NO: 428, and an amino acid that is at least 90%, 91%, 92%, 93%, 94%, 95%, 96%, 97%, 98% or 99% identical to an amino acid sequence selected from the group consisting of SEQ ID NO: 430, 432, 434, and 1202.

[0139] In some embodiments, the activatable antibody includes an amino acid that is at least 90%, 91%, 92%, 93%, 94%, 95%, 96%, 97%, 98% or 99% identical to the amino acid sequence of SEQ ID NO: 1008. In some embodiments, the activatable antibody includes an amino acid that is at least 90%, 91%, 92%, 93%, 94%, 95%, 96%, 97%, 98% or 99% identical to an amino acid sequence selected from the group consisting of SEQ ID NO: 430, 432, 434, and 1202. In some embodiments, the activatable antibody includes an amino acid that is at least 90%, 91%, 92%, 93%, 94%, 95%, 96%, 97%, 98% or 99% identical to the amino acid sequence of SEQ ID NO: 1008, and an amino acid that is at least 90%, 91%, 92%, 93%, 94%, 95%, 96%, 97%, 98% or 99% identical to an amino acid sequence selected from the group consisting of SEQ ID NO: 430, 432, 434, and 1202.

[0140] In some embodiments, the activatable antibody comprises a masking moiety (MM) comprising an amino acid sequence selected from the group consisting of SEQ ID NOs: 59-81, 208, and 426; a cleavable moiety (CM) comprising an amino acid sequence selected from the group consisting of SEQ ID NOs: 341, 352, 359, 364, 372, 377, 379, 383, 394, 437, 883-893, 901-920, and 921; and a combination of a VH CDR1 sequence, a VH CDR2 sequence, a VH CDR3 sequence, a VL CDR1 sequence, a VL CDR2 sequence, and a VL CDR3 sequence, wherein the combination comprises a VL CDR1 sequence comprising RASQSISSYLN (SEQ ID NO: 209); a VL CDR2 sequence comprising AASSLQS (SEQ ID NO: 215); a VL CDR3 sequence comprising DNGYPST (SEQ ID NO: 228); a VH CDR1 sequence comprising SYAMS (SEQ ID NO: 212); a VH CDR2 sequence comprising SSIWRNGIVTVYADS (SEQ ID NO: 246); and a VH CDR3 sequence comprising WSAAFDY (SEQ ID NO: 235).

[0141] In some embodiments, the activatable antibody comprises a masking moiety (MM) comprising an amino acid sequence selected from the group consisting of SEQ ID NOs: 60, 62, 63, 66-68, 71, 75, and 76; a cleavable moiety (CM) comprising an amino acid sequence selected from the group consisting of SEQ ID NOs: 341, 364, 377, 394, 437, 883-893, 901-911, and 920; and a combination of a VH CDR1 sequence, a VH CDR2 sequence, a VH CDR3 sequence, a VL CDR1 sequence, a VL CDR2 sequence, and a VL CDR3 sequence, wherein the combination comprises a VL CDR1 sequence comprising RASQSISSYLN (SEQ ID NO: 209); a VL CDR2 sequence comprising AASSLQS (SEQ ID NO: 215); a VL CDR3 sequence comprising DNGYPST (SEQ ID NO: 228); a VH CDR1 sequence comprising SYAMS (SEQ ID NO: 212); a VH CDR2 sequence comprising SSIWRNGIVTVYADS (SEQ ID NO: 246), and a VH CDR3 sequence comprising WSAAFDY (SEQ ID NO: 235).

[0142] In some embodiments, the activatable antibody comprises a masking moiety (MM) comprising an amino acid sequence selected from the group consisting of SEQ ID NOs: 59-81, 208, and 426; a cleavable moiety (CM) comprising an amino acid sequence selected from the group consisting of SEQ ID NOs: 341, 352, 359, 364, 372, 377, 379, 383, 394, 437, 883-893, 901-920, and 921; and of a variable light chain comprising the amino acid sequence of SEQ ID NO: 58 and a variable heavy chain comprising the amino acid sequence of SEQ ID NO: 46.

[0143] In some embodiments, the activatable antibody comprises a masking moiety (MM) comprising an amino acid sequence selected from the group consisting of SEQ ID NOs: 60, 62, 63, 66-68, 71, 75, and 76; a cleavable moiety (CM) comprising an amino acid sequence selected from the group consisting of SEQ ID NOs: 341, 364, 377, 394, 437, 883-893, 901-911, and 920; and of a variable light chain comprising the amino acid sequence of SEQ ID NO: 58 and a variable heavy chain comprising the amino acid sequence of SEQ ID NO: 46.

[0144] In some embodiments, the activatable antibody comprises a masking moiety (MM) comprising an amino acid sequence selected from the group consisting of SEQ ID NOs: 59-81, 208, and 426; a cleavable moiety (CM) comprising an amino acid sequence selected from the group consisting of SEQ ID NOs: 341, 352, 359, 364, 372, 377, 379, 383, 394, 437, 883-893, 901-920, and 921; and of a variable light chain comprising the amino acid sequence of SEQ ID NO: 12 and a variable heavy chain comprising the amino acid sequence of SEQ ID NO: 46.

[0145] In some embodiments, the activatable antibody comprises a masking moiety (MM) comprising an amino acid sequence selected from the group consisting of SEQ ID NOs: 60, 62, 63, 66-68, 71, 75, and 76; a cleavable moiety (CM) comprising an amino acid sequence selected from the group consisting of SEQ ID NOs: 341, 364, 377, 394, 437, 883-893, 901-11, and 920; and of a variable light chain comprising the amino acid sequence of SEQ ID NO: 12 and a variable heavy chain comprising the amino acid sequence of SEQ ID NO: 46.

[0146] In some embodiments, the activatable antibody is encoded by a nucleic acid sequence that comprises a nucleic acid sequence encoding a heavy chain amino acid sequence selected from the group consisting of SEQ ID NO: 14, 16, 18, 20, 22, 24, 26, 28, 30, 32, 34, 36, 38, 40, 42, 44, 46, 48, 50, 52, 54, and 56. In some embodiments, the activatable antibody is encoded by a nucleic acid sequence that comprises a nucleic acid sequence encoding a heavy chain amino acid sequence selected from the group consisting of SEQ ID NO: 46, 48, 50, 52, 54, and 56. In some embodiments, the activatable antibody is encoded by a nucleic acid sequence that comprises a nucleic acid sequence encoding a light chain amino acid sequence comprising SEQ ID NO: 58. In some embodiments, the activatable antibody is encoded by a nucleic acid sequence that comprises a nucleic acid sequence encoding a light chain amino acid sequence comprising SEQ ID NO: 12. In some embodiments, the activatable antibody is encoded by a nucleic acid sequence that comprises a nucleic acid sequence encoding a heavy chain amino acid sequence selected from the group consisting of SEQ ID NO: 14, 16, 18, 20, 22, 24, 26, 28, 30, 32, 34, 36, 38, 40, 42, 44, 46, 48, 50, 52, 54, and 56, and a nucleic acid sequence that comprises a nucleic acid sequence encoding a light chain amino acid sequence comprising SEQ ID NO: 58. In some embodiments, the activatable antibody is encoded by a nucleic acid sequence that comprises a nucleic acid sequence encoding a heavy chain amino acid sequence selected from the group consisting of SEQ ID NO: 14, 16, 18, 20, 22, 24, 26, 28, 30, 32, 34, 36, 38, 40, 42, 44, 46, 48, 50, 52, 54, and 56, and a nucleic acid sequence that comprises a nucleic acid sequence encoding a light chain amino acid sequence comprising SEQ ID NO: 12. In some embodiments, the activatable antibody is encoded by a nucleic acid sequence that comprises a nucleic acid sequence encoding a heavy chain amino acid sequence selected from the group consisting of SEQ ID NO: 46, 48, 50, 52, 54, and 56, and a nucleic acid sequence that comprises a nucleic acid sequence encoding a light chain amino acid sequence comprising SEQ ID NO: 58. In some embodiments, the activatable antibody is encoded by a nucleic acid sequence that comprises a nucleic acid sequence encoding a heavy chain amino acid sequence selected from the group consisting of SEQ ID NO: 46, 48, 50, 52, 54, and 56, and a nucleic acid sequence that comprises a nucleic acid sequence encoding a light chain amino acid sequence comprising SEQ ID NO: 12.

[0147] In some embodiments, the activatable antibody is encoded by a nucleic acid sequence that comprises a nucleic acid sequence encoding a heavy chain amino acid sequence that is at least 90%, 91%, 92%, 93%, 94%, 95%, 96%, 97%, 98% or 99% identical to an amino acid sequence selected from the group consisting of SEQ ID NO: 14, 16, 18, 20, 22, 24, 26, 28, 30, 32, 34, 36, 38, 40, 42, 44, 46, 48, 50, 52, 54, and 56. In some embodiments, the activatable antibody is encoded by a nucleic acid sequence that comprises a nucleic acid sequence encoding a heavy chain amino acid sequence that is at least 90%, 91%, 92%, 93%, 94%, 95%, 96%, 97%, 98% or 99% identical to an amino acid sequence selected from the group consisting of SEQ ID NO: 46, 48, 50, 52, 54, and 56. In some embodiments, the activatable antibody is encoded by a nucleic acid sequence that comprises a nucleic acid sequence encoding a light chain amino acid that is at least 90%, 91%, 92%, 93%, 94%, 95%, 96%, 97%, 98% or 99% identical to the amino acid sequence of SEQ ID NO: 58. In some embodiments, the activatable antibody is encoded by a nucleic acid sequence that comprises a nucleic acid sequence encoding a light chain amino acid that is at least 90%, 91%, 92%, 93%, 94%, 95%, 96%, 97%, 98% or 99% identical to the amino acid sequence of SEQ ID NO: 12. In some embodiments, the activatable antibody is encoded by a nucleic acid sequence that comprises a nucleic acid sequence encoding a heavy chain amino acid sequence that is at least 90%, 91%, 92%, 930%, 94%, 95%, 96%, 97%, 98% or 99% identical to an amino acid sequence selected from the group consisting of SEQ ID NO: 14, 16, 18, 20, 22, 24, 26, 28, 30, 32, 34, 36, 38, 40, 42, 44, 46, 48, 50, 52, 54, and 56, and a nucleic acid sequence that comprises a nucleic acid sequence encoding a light chain amino acid that is at least 90%, 91%, 92%, 93%, 94%, 95%, 96%, 97%, 98% or 99% identical to the amino acid sequence of SEQ ID NO: 58. In some embodiments, the activatable antibody is encoded by a nucleic acid sequence that comprises a nucleic acid sequence encoding a heavy chain amino acid sequence that is at least 90%, 91%, 92%, 930%, 94%, 95%, 96%, 97%, 98% or 99%6 identical to an amino acid sequence selected from the group consisting of SEQ ID NO: 14, 16, 18, 20, 22, 24, 26, 28, 30, 32, 34, 36, 38, 40, 42, 44, 46, 48, 50, 52, 54, and 56, and a nucleic acid sequence that comprises a nucleic acid sequence encoding a light chain amino acid that is at least 90%, 91%, 92%, 93%, 94%, 95%, 96%, 97%, 98% or 99% identical to the amino acid sequence of SEQ ID NO: 12. In some embodiments, the activatable antibody is encoded by a nucleic acid sequence that comprises a nucleic acid sequence encoding a heavy chain amino acid sequence that is at least 90%, 91%, 92%, 93%, 94%, 95%, 96%, 97%, 98% or 99% identical to an amino acid sequence selected from the group consisting of SEQ ID NO: 46, 48, 50, 52, 54, and 56, and a nucleic acid sequence that comprises a nucleic acid sequence encoding a light chain amino acid that is at least 90%, 91%, 92%, 93%, 94%, 95%, 96%, 97%, 98% or 99% identical to the amino acid sequence of SEQ ID NO: 58. In some embodiments, the activatable antibody is encoded by a nucleic acid sequence that comprises a nucleic acid sequence encoding a heavy chain amino acid sequence that is at least 90%, 91%, 92%, 93%, 94%, 95%, 96%, 97%, 98% or 99% identical to an amino acid sequence selected from the group consisting of SEQ ID NO: 46, 48, 50, 52, 54, and 56, and a nucleic acid sequence that comprises a nucleic acid sequence encoding a light chain amino acid that is at least 90%, 91%, 92%, 93%, 94%, 95%, 96%, 97%, 98% or 99% identical to the amino acid sequence of SEQ ID NO: 12.

[0148] In some embodiments, the activatable antibody is encoded by a heavy chain nucleic acid sequence selected from the group consisting of SEQ ID NO: 13, 15, 17, 21, 23, 25, 27, 29, 31, 33, 35, 37, 39, 41, 43, 45, 47, 49, 51, 53, and 55. In some embodiments, the activatable antibody is encoded by a heavy chain nucleic acid sequence selected from the group consisting of SEQ ID NO: 45, 47, 49, 51, 53, and 55. In some embodiments, the activatable antibody is encoded by the light chain nucleic acid sequence of SEQ ID NO: 57. In some embodiments, the activatable antibody is encoded by the light chain nucleic acid sequence of SEQ ID NO: 11. In some embodiments, the activatable antibody is encoded by heavy chain nucleic acid sequence selected from the group consisting of SEQ ID NO: 13, 15, 17, 21, 23, 25, 27, 29, 31, 33, 35, 37, 39, 41, 43, 45, 47, 49, 51, 53, and 55, and a light chain nucleic acid sequence comprising SEQ ID NO: 57. In some embodiments, the activatable antibody is encoded by heavy chain nucleic acid sequence selected from the group consisting of SEQ ID NO. 13, 15, 17, 21, 23, 25, 27, 29, 31, 33, 35, 37, 39, 41, 43, 45, 47, 49, 51, 53, and 55, and a light chain nucleic acid sequence comprising SEQ ID NO: 11. In some embodiments, the activatable antibody is encoded by a nucleic acid sequence that comprises a heavy chain nucleic acid sequence selected from the group consisting of SEQ ID NO: 45, 47, 49, 51, 53, and 55, and a light chain nucleic acid sequence comprising SEQ ID NO: 57. In some embodiments, the activatable antibody is encoded by a nucleic acid sequence that comprises a heavy chain nucleic acid sequence selected from the group consisting of SEQ ID NO: 45, 47, 49, 51, 53, and 55, and a light chain nucleic acid sequence comprising SEQ ID NO: 11.

[0149] In some embodiments, the activatable antibody is encoded by a nucleic acid sequence that is at least 90%, 91%, 92%, 93%, 94%, 95%, 96%, 97%, 98% or 99% identical to a heavy chain nucleic acid sequence selected from the group consisting of SEQ ID NO: 13, 15, 17, 21, 23, 25, 27, 29, 31, 33, 35, 37, 39, 41, 43, 45, 47, 49, 51, 53, and 55. In some embodiments, the activatable antibody is encoded by a nucleic acid sequence that is at least 90%, 91%, 92%, 93%, 94%, 95%, 96%, 97%, 98% or 99% identical to a heavy chain nucleic acid sequence selected from the group consisting of SEQ ID NO: 45, 47, 49, 51, 53, and 55. In some embodiments, the activatable antibody is encoded by a nucleic acid sequence that is at least 90%, 91%, 92%, 93%, 94%, 95%, 96%, 97%, 98% or 99% identical to the light chain nucleic acid sequence of SEQ ID NO: 57. In some embodiments, the activatable antibody is encoded by a nucleic acid sequence that is at least 90%, 91%, 92%, 93%, 94%, 95%, 96%, 97%, 98% or 99% identical to the light chain nucleic acid sequence of SEQ ID NO: 11. In some embodiments, the activatable antibody is encoded by a nucleic acid sequence that is at least 90%, 91%, 92%, 93%, 94%, 95%, 96%, 97%, 98% or 99% identical to a heavy chain nucleic acid sequence selected from the group consisting of SEQ ID NO: 13, 15, 17, 21, 23, 25, 27, 29, 31, 33, 35, 37, 39, 41, 43, 45, 47, 49, 51, 53, and 55, and a nucleic acid sequence that is at least 90%, 91%, 92%, 93%, 94%, 95%, 96%, 97%, 98% or 99% identical to the light chain nucleic acid sequence comprising SEQ ID NO: 57. In some embodiments, the activatable antibody is encoded by a nucleic acid sequence that is at least 90%, 91%, 92%, 93%, 94%, 95%, 96%, 97%, 98% or 99% identical to a heavy chain nucleic acid sequence selected from the group consisting of SEQ ID NO: 13, 15, 17, 21, 23, 25, 27, 29, 31, 33, 35, 37, 39, 41, 43, 45, 47, 49, 51, 53, and 55, and a nucleic acid sequence that is at least 90%, 91%, 92%, 93%, 94%, 95%, 96%, 97%, 98% or 99% identical to the light chain nucleic acid sequence comprising SEQ ID NO: 11. In some embodiments, the activatable antibody is encoded by a nucleic acid sequence that comprises a nucleic acid sequence that is at least 90%, 91%, 92%, 93%, 94%, 95%, 96%, 97%, 98% or 99% identical to heavy chain nucleic acid sequence selected from the group consisting of SEQ ID NO: 45, 47, 49, 51, 53, and 55, and a nucleic acid sequence that is at least 90%, 91%, 92%, 93%, 94%, 95%, 96%, 97%, 98% or 99% identical to light chain nucleic acid sequence comprising SEQ ID NO: 57. In some embodiments, the activatable antibody is encoded by a nucleic acid sequence that comprises a nucleic acid sequence that is at least 90%, 91%, 92%, 93%, 94%, 95%, 96%, 97%, 98% or 99% identical to heavy chain nucleic acid sequence selected from the group consisting of SEQ ID NO: 45, 47, 49, 51, 53, and 55, and a nucleic acid sequence that is at least 90%, 91%, 92%, 93%, 94%, 95%, 96%, 97%, 98% or 99% identical to light chain nucleic acid sequence comprising SEQ ID NO: 11.

[0150] In some embodiments, the MM has a dissociation constant for binding to the AB that is greater than the dissociation constant of the AB to PDL1.

[0151] In some embodiments, the MM has a dissociation constant for binding to the AB that is no more than the dissociation constant of the AB to PDL1.

[0152] In some embodiments, the MM has a dissociation constant for binding to the AB that is less than the dissociation constant of the AB to PDL1.

[0153] In some embodiments, the MM has a dissociation constant for binding to the AB that is approximately equal to the dissociation constant of the AB to PDL1.

[0154] In some embodiments, the MM does not interfere or compete with the AB for binding to PDL1 when the activatable antibody is in a cleaved state.

[0155] In some embodiments, the MM is a polypeptide of about 2 to 40 amino acids in length. In some embodiments, the MM is a polypeptide of up to about 40 amino acids in length.

[0156] In some embodiments, the MM polypeptide sequence is different from that of PDL1. In some embodiments, the MM polypeptide sequence is no more than 50% identical to any natural binding partner of the AB. In some embodiments, the MM polypeptide sequence is different from that of PDL1 and is no more than 40%, 30%, 25%, 20%, 15%, or 10% identical to any natural binding partner of the AB.

[0157] In some embodiments, the MM comprises an amino acid sequence selected from the group consisting of SEQ ID NOs: 59-81, 208, and 426. In some embodiments, the MM comprises an amino acid sequence that is at least 90%, 91%, 92%, 93%, 94%, 95%, 96%, 97%, 98% or 99% identical to an amino acid sequence selected from the group consisting of SEQ ID NOs: 59-81, 208, and 426.

[0158] In some embodiments, the coupling of the MM to the AB reduces the ability of the AB to bind PDL1 such that the dissociation constant (K_{d}) of the AB when coupled to the MM towards PDL1 is at least two times greater than the K_{d} of the AB when not coupled to the MM towards PDL1.

[0159] In some embodiments, the coupling of the MM to the AB reduces the ability of the AB to bind PDL1 such that the dissociation constant (K_{d}) of the AB when coupled to the MM towards PDL1 is at least five times greater than the K_{d} of the AB when not coupled to the MM towards PDL1.

[0160] In some embodiments, the coupling of the MM to the AB reduces the ability of the AB to bind PDL1 such that the dissociation constant (K_{d}) of the AB when coupled to the MM towards PDL1 is at least 10 times greater than the K_{d} of the AB when not coupled to the MM towards PDL1.

[0161] In some embodiments, the coupling of the MM to the AB reduces the ability of the AB to bind PDL1 such that the dissociation constant (K_{d}) of the AB when coupled to the MM towards PDL1 is at least 20 times greater than the K_{d} of the AB when not coupled to the MM towards PDL1.

[0162] In some embodiments, the coupling of the MM to the AB reduces the ability of the AB to bind PDL1 such that the dissociation constant (K_{d}) of the AB when coupled to the MM towards PDL1 is at least 40 times greater than the K_{d} of the AB when not coupled to the MM towards PDL1.

[0163] In some embodiments, the coupling of the MM to the AB reduces the ability of the AB to bind PDL1 such that the dissociation constant (K_{d}) of the AB when coupled to the MM towards PDL1 is at least 100 times greater than the K_{d} of the AB when not coupled to the MM towards PDL1.

[0164] In some embodiments, the coupling of the MM to the AB reduces the ability of the AB to bind PDL1 such that the dissociation constant (K_{d}) of the AB when coupled to the MM towards PDL1 is at least 1000 times greater than the K_{d} of the AB when not coupled to the MM towards PDL1.

[0165] In some embodiments, the coupling of the MM to the AB reduces the ability of the AB to bind PDL1 such that the dissociation constant (K_{d}) of the AB when coupled to the MM towards PDL1 is at least 10,000 times greater than the K_{d} of the AB when not coupled to the MM towards PDL1.

[0166] In some embodiments, in the presence of PDL1, the MM reduces the ability of the AB to bind PDL1 by at least 90% when the CM is uncleaved, as compared to when the CM is cleaved when assayed in vitro using a target displacement assay such as, for example, the assay described in PCT Publication No. WO 2010/081173, the contents of which are hereby incorporated by reference in their entirety.

[0167] In some embodiments, the protease that cleaves the CM is active, e.g., up-regulated, in diseased tissue, and the protease cleaves the CM in the activatable antibody when the activatable antibody is exposed to the protease.

[0168] In some embodiments, the protease is co-localized with PDL1 in a tissue, and the protease cleaves the CM in the activatable antibody when the activatable antibody is exposed to the protease.

[0169] In some embodiments, the protease is present at relatively higher levels in or in close proximity to target-containing tissue of a treatment site or diagnostic site than in tissue of non-treatment sites (for example in healthy tissue), and the protease cleaves the CM in the activatable antibody when the activatable antibody is exposed to the protease.

[0170] In some embodiments, the CM is positioned in the activatable antibody such that when the activatable antibody is in the uncleaved state, binding of the activatable antibody to PDL1 is reduced to occur with a dissociation constant that is at least twofold greater than the dissociation constant of an unmodified AB binding to PDL1, whereas in the cleaved state (i.e., when the activatable antibody is in the cleaved state), the AB binds PDL1.

[0171] In some embodiments, the CM is positioned in the activatable antibody such that when the activatable antibody is in the uncleaved state, binding of the activatable antibody to PDL1 is reduced to occur with a dissociation constant that is at least fivefold greater than the dissociation constant of an unmodified AB binding to PDL1, whereas in the cleaved state (i.e., when the activatable antibody is in the cleaved state), the AB binds PDL1.

[0172] In some embodiments, the CM is positioned in the activatable antibody such that when the activatable antibody is in the uncleaved state, binding of the activatable antibody to PDL1 is reduced to occur with a dissociation constant that is at least 10-fold greater than the dissociation constant of an unmodified AB binding to PDL1, whereas in the cleaved state (i.e., when the activatable antibody is in the cleaved state), the AB binds PDL1.

[0173] In some embodiments, the CM is positioned in the activatable antibody such that when the activatable antibody is in the uncleaved state, binding of the activatable antibody to PDL1 is reduced to occur with a dissociation constant that is at least 20-fold greater than the dissociation constant of an unmodified AB binding to PDL1, whereas in the cleaved state (i.e., when the activatable antibody is in the cleaved state), the AB binds PDL1.

[0174] In some embodiments, the CM is positioned in the activatable antibody such that when the activatable antibody is in the uncleaved state, binding of the activatable antibody to PDL1 is reduced to occur with a dissociation constant that is at least 40-fold greater than the dissociation constant of an unmodified AB binding to PDL1, whereas in the cleaved state, the AB binds PDL1.

[0175] In some embodiments, the CM is positioned in the activatable antibody such that when the activatable antibody is in the uncleaved state, binding of the activatable antibody to PDL1 is reduced to occur with a dissociation constant that is at least 50-fold greater than the dissociation constant of an unmodified AB binding to PDL1, whereas in the cleaved state, the AB binds PDL1.

[0176] In some embodiments, the CM is positioned in the activatable antibody such that when the activatable antibody is in the uncleaved state, binding of the activatable antibody to PDL1 is reduced to occur with a dissociation constant that is at least 100-fold greater than the dissociation constant of an unmodified AB binding to PDL1, whereas in the cleaved state, the AB binds PDL1.

[0177] In some embodiments, the CM is positioned in the activatable antibody such that when the activatable antibody is in the uncleaved state, binding of the activatable antibody to PDL1 is reduced to occur with a dissociation constant that is at least 200-fold greater than the dissociation constant of an unmodified AB binding to PDL1, whereas in the cleaved state, the AB binds PDL1.

[0178] In some embodiments, the CM is a polypeptide of up to 15 amino acids in length.

[0179] In some embodiments, the CM is a polypeptide that includes a first cleavable moiety (CM1) that is a substrate for at least one matrix metalloprotease (MMP) and a second cleavable moiety (CM2) that is a substrate for at least one serine protease (SP). In some embodiments, each of the CM1 substrate sequence and the CM2 substrate sequence of the CM1-CM2 substrate is independently a polypeptide of up to 15 amino acids in length.

[0180] In some embodiments, the CM is a substrate for at least one protease that is or is believed to be up-regulated in cancer. In some embodiments, the CM is a substrate for at least one protease that is or is believed to be up-regulated in inflammation. In some embodiments, the CM is a substrate for at least one protease that is or is believed to be up-regulated in autoimmunity.

[0181] In some embodiments, the CM is a substrate for at least one protease selected from the group consisting of a matrix metalloprotease (MMP), a thrombin, a neutrophil elastase, a cysteine protease, a legumain, and a serine protease, such as a matriptase (MT-SP1), and a urokinase (uPA). Without being bound by theory, it is believed that these proteases are up-regulated in at least one of cancer, inflammation, and/or autoimmunity.

[0182] Exemplary substrates include but are not limited to substrates cleavable by one or more of the following enzymes or proteases listed in Table 12.

[0183] In some embodiments, the CM is selected for use with a specific protease, for example a protease that is known to be co-localized with the target of the activatable antibody.

[0184] In some embodiments, the CM is selected for use with a specific protease, for example a protease that is known to be in close proximity to the target of the activatable antibody.

[0185] In some embodiments, the CM is a substrate for at least one MMP. Examples of MMPs include the MMPs listed in the Table 12. In some embodiments, the CM is a substrate for a protease selected from the group consisting of MMP 9, MMP14, MMP1, MMP3, MMP13, MMP17, MMP11, and MMP19. In some embodiments the CM is a substrate for MMP9. In some embodiments, the CM is a substrate for MMP14.

[0186] In some embodiments, the CM is a substrate that includes the sequence TGRGPSWV (SEQ ID NO: 338); SARGPSRW (SEQ ID NO: 339); TARGPSFK (SEQ ID NO: 340); LSGRSDNH (SEQ ID NO: 341); GGWHTGRN (SEQ ID NO: 342); HTGRSGAL (SEQ ID NO: 343); PLTGRSGG (SEQ ID NO: 344); AARGPAIH (SEQ ID NO: 345); RGPAFNPM (SEQ ID NO: 346); SSRGPAYL (SEQ ID NO: 347); RGPATPIM (SEQ ID NO: 348); RGPA (SEQ ID NO: 349); GGQPSGMWGW (SEQ ID NO: 350); FPRPLGITGL (SEQ ID NO: 351); VHMPLGFLGP (SEQ ID NO: 352); SPLTGRSG (SEQ ID NO: 353); SAGFSLPA (SEQ ID NO: 354); LAPLGLQRR (SEQ ID NO: 355); SGGPLGVR (SEQ ID NO: 356); PLGL (SEQ ID NO: 357); LSGRSGNH (SEQ ID NO: 883); SGRSANPRG (SEQ ID NO: 884); LSGRSDDH (SEQ ID NO: 885); LSGRSDIH (SEQ ID NO: 886); LSGRSDQH (SEQ ID NO: 887); LSGRSDTH (SEQ ID NO: 888); LSGRSDYH (SEQ ID NO: 889); LSGRSDNP (SEQ ID NO: 890); LSGRSANP (SEQ ID NO: 891); LSGRSANI (SEQ ID NO: 892); and/or LSGRSDNI (SEQ ID NO: 893).

[0187] In some embodiments, the CM comprises the amino acid sequence LSGRSDNH (SEQ ID NO: 341). In some embodiments, the CM comprises the amino acid sequence TGRGPSWV (SEQ ID NO: 338). In some embodiments, the CM comprises the amino acid sequence PLTGRSGG (SEQ ID NO: 344). In some embodiments, the CM comprises the amino acid sequence GGQPSGMWGW (SEQ ID NO: 350). In some embodiments, the CM comprises the amino acid sequence FPRPLGITGL (SEQ ID NO: 351). In some embodiments, the CM comprises the amino acid sequence VHMPLGFLGP (SEQ ID NO: 352). In some embodiments, the CM comprises the amino acid sequence PLGL (SEQ ID NO: 357). In some embodiments, the CM comprises the amino acid sequence SARGPSRW (SEQ ID NO: 339). In some embodiments, the CM comprises the amino acid sequence TARGPSFK (SEQ ID NO: 340). In some embodiments, the CM comprises the amino acid sequence GGWHTGRN (SEQ ID NO: 342). In some embodiments, the CM comprises the amino acid sequence HTGRSGAL (SEQ ID NO: 343). In some embodiments, the CM comprises the amino acid sequence AARGPAIH (SEQ ID NO: 345). In some embodiments, the CM comprises the amino acid sequence RGPAFNPM (SEQ ID NO: 346). In some embodiments, the CM comprises the amino acid sequence SSRGPAYL (SEQ ID NO: 347). In some embodiments, the CM comprises the amino acid sequence RGPATPIM (SEQ ID NO: 348). In some embodiments, the CM comprises the amino acid sequence RGPA (SEQ ID NO: 349). In some embodiments, the CM comprises the amino acid sequence LSGRSGNH (SEQ ID NO: 883). In some embodiments, the CM comprises the amino acid sequence SGRSANPRG (SEQ ID NO: 884). In some embodiments, the CM comprises the amino acid sequence LSGRSDDH (SEQ ID NO: 885). In some embodiments, the CM comprises the amino acid sequence LSGRSDIH (SEQ ID NO: 886). In some embodiments, the CM comprises the amino acid sequence LSGRSDQH (SEQ ID NO: 887). In some embodiments, the CM comprises the amino acid sequence LSGRSDTH (SEQ ID NO: 888). In some embodiments, the CM comprises the amino acid sequence LSGRSDYH (SEQ ID NO: 889). In some embodiments, the CM comprises the amino acid sequence LSGRSDNP (SEQ ID NO: 890). In some embodiments, the CM comprises the amino acid sequence LSGRSANP (SEQ ID NO: 891). In some embodiments, the CM comprises the amino acid sequence LSGRSANI (SEQ ID NO: 892). In some embodiments, the CM comprises the amino acid sequence LSGRSDNI (SEQ ID NO: 893)

[0188] In some embodiments, the CM is a substrate for an MMP and includes the sequence ISSGLSS (SEQ ID NO: 358); QNQALRMA (SEQ ID NO: 359); AQNLLGMV (SEQ ID NO: 360); STFPFGMF (SEQ ID NO: 361); PVGYTSSL (SEQ ID NO: 362), DWLYWPGI (SEQ ID NO: 363), ISSGLLSS (SEQ ID NO: 364), LKAAPRWA (SEQ ID NO: 365); GPSHLVLT (SEQ ID NO: 366), LPGGLSPW (SEQ ID NO: 367); MGLFSEAG (SEQ ID NO: 368); SPLPLRVP (SEQ ID NO: 369); RMHLRSLG (SEQ ID NO: 370); LAAPLGLL (SEQ ID NO: 371); AVGLLAPP (SEQ ID NO: 372); LLAPSHRA (SEQ ID NO: 373). PAGLWLDP (SEQ ID NO: 374); MIAPVAYR (SEQ ID NO: 894); RPSPMWAY (SEQ ID NO: 895); WATPRPMR (SEQ ID NO: 896); FRLLDWQW (SEQ ID NO: 897); ISSGL (SEQ ID NO: 898); ISSGLLS (SEQ ID NO: 899); and/or ISSGLL (SEQ ID NO: 900).

[0189] In some embodiments, the CM comprises the amino acid sequence ISSGLSS (SEQ ID NO: 358). In some embodiments, the CM comprises the amino acid sequence QNQALRMA (SEQ ID NO: 359). In some embodiments, the CM comprises the amino acid sequence AQNLLGMV (SEQ ID NO: 360). In some embodiments, the CM comprises the amino acid sequence STFPFGMF (SEQ ID NO: 361). In some embodiments, the CM comprises the amino acid sequence PVGYTSSL (SEQ ID NO: 362). In some embodiments, the CM comprises the amino acid sequence DWLYWPGI (SEQ ID NO: 363). In some embodiments, the CM comprises the amino acid sequence ISSGLLSS (SEQ ID NO: 364). In some embodiments, the CM comprises the amino acid sequence LKAAPRWA (SEQ ID NO: 365). In some embodiments, the CM comprises the amino acid sequence GPSHLVLT (SEQ ID NO: 366). In some embodiments, the CM comprises the amino acid sequence LPGGLSPW (SEQ ID NO: 367). In some embodiments, the CM comprises the amino acid sequence MGLFSEAG (SEQ ID NO: 368). In some embodiments, the CM comprises the amino acid sequence SPLPLRVP (SEQ ID NO: 369). In some embodiments, the CM comprises the amino acid sequence RMHLRSLG (SEQ ID NO: 370). In some embodiments, the CM comprises the amino acid sequence LAAPLGLL (SEQ ID NO: 371). In some embodiments, the CM comprises the amino acid sequence AVGLLAPP (SEQ ID NO: 372). In some embodiments, the CM comprises the amino acid sequence LLAPSHRA (SEQ ID NO: 373). In some embodiments, the CM comprises the amino acid sequence PAGLWLDP (SEQ ID NO: 374). In some embodiments, the CM comprises the amino acid sequence MIAPVAYR (SEQ ID NO: 894). In some embodiments, the CM comprises the amino acid sequence RPSPMWAY (SEQ ID NO: 895). In some embodiments, the CM comprises the amino acid sequence WATPRPMR (SEQ ID NO: 896). In some embodiments, the CM comprises the amino acid sequence FRLLDWQW (SEQ ID NO: 897). In some embodiments, the CM comprises the amino acid sequence ISSGL (SEQ ID NO: 898). In some embodiments, the CM comprises the amino acid sequence ISSGLLS (SEQ ID NO: 899). In some embodiments, the CM comprises the amino acid sequence ISSGLL (SEQ ID NO: 900).

[0190] In some embodiments, the CM is a substrate for thrombin. In some embodiments, the CM is a substrate for thrombin and includes the sequence GPRSFGL (SEQ ID NO. 375) or GPRSFG (SEQ ID NO: 376). In some embodiments, the CM comprises the amino acid sequence GPRSFGL (SEQ ID NO: 375). In some embodiments, the CM comprises the amino acid sequence GPRSFG (SEQ ID NO: 376).

[0191] In some embodiments, the CM comprises an amino acid sequence selected from the group consisting of NTLSGRSENHSG (SEQ ID NO: 435); NTLSGRSGNHGS (SEQ ID NO: 436); TSTSGRSANPRG (SEQ ID NO: 437); TSGRSANP (SEQ ID NO: 438); VAGRSMRP (SEQ ID NO: 439); VVPEGRRS (SEQ ID NO: 440); ILPRSPAF (SEQ ID NO: 441); MVLGRSLL (SEQ ID NO: 442); QGRAITFI (SEQ ID NO: 443); SPRSIMLA (SEQ ID NO: 444); and SMLRSMPL (SEQ ID NO: 445).

[0192] In some embodiments, the CM comprises the amino acid sequence NTLSGRSENHSG (SEQ ID NO: 435). In some embodiments, the CM comprises the amino acid sequence NTLSGRSGNHGS (SEQ ID NO: 436). In some embodiments, the CM comprises the amino acid sequence TSTSGRSANPRG (SEQ ID NO: 437). In some embodiments, the CM comprises the amino acid sequence TSGRSANP (SEQ ID NO: 438). In some embodiments, the CM comprises the amino acid sequence VAGRSMRP (SEQ ID NO: 439). In some embodiments, the CM comprises the amino acid sequence VVPEGRRS (SEQ ID NO: 440). In some embodiments, the CM comprises the amino acid sequence ILPRSPAF (SEQ ID NO: 441).

[0193] In some embodiments, the CM comprises the amino acid sequence MVLGRSLL (SEQ ID NO: 442). In some embodiments, the CM comprises the amino acid sequence QGRAITFI (SEQ ID NO: 443). In some embodiments, the CM comprises the amino acid sequence SPRSIMLA (SEQ ID NO: 444). In some embodiments, the CM comprises the amino acid sequence SMLRSMPL (SEQ ID NO: 445).

[0194] In some embodiments, the CM is a substrate for a neutrophil elastase. In some embodiments, the CM is a substrate for a serine protease. In some embodiments, the CM is a substrate for uPA. In some embodiments, the CM is a substrate for legumain. In some embodiments, the CM is a substrate for matriptase. In some embodiments, the CM is a substrate for a cysteine protease. In some embodiments, the CM is a substrate for a cysteine protease, such as a cathepsin.

[0195] In some embodiments, the CM is a CM1-CM2 substrate and includes the sequence ISSGLLSGRSDNH (SEQ ID NO: 377); ISSGLLSSGGSGGSLSGRSDNH (SEQ ID NO: 378); AVGLLAPPGGTSTSGRSANPRG (SEQ ID NO: 379); TSTSGRSANPRGGGAVGLLAPP (SEQ ID NO: 380); VHMPLGFLGPGGTSTSGRSANPRG (SEQ ID NO: 381); TSTSGRSANPRGGGVHMPLGFLGP (SEQ ID NO: 382); AVGLLAPPGGLSGRSDNH (SEQ ID NO: 383); LSGRSDNHGGAVGLLAPP (SEQ ID NO: 384); VHMPLGFLGPGGLSGRSDNH (SEQ ID NO: 385); LSGRSDNHGGVHMPLGFLGP (SEQ ID NO: 386); LSGRSDNHGGSGGSISSGLLSS (SEQ ID NO: 387); LSGRSGNHGGSGGSISSGLLSS (SEQ ID NO: 388); ISSGLLSSGGSGGSLSGRSGNH (SEQ ID NO: 389); LSGRSDNHGGSGGSQNQALRMA (SEQ ID NO: 390); QNQALRMAGGSGGSLSGRSDNH (SEQ ID NO: 391); LSGRSGNHGGSGGSQNQALRMA (SEQ ID NO: 392); QNQALRMAGGSGGSLSGRSGNH (SEQ ID NO: 393); ISSGLLSGRSGNH (SEQ ID NO: 394); ISSGLLSGRSANPRG (SEQ ID NO: 901); AVGLLAPPTSGRSANPRG (SEQ ID NO: 902); AVGLLAPPSGRSANPRG (SEQ ID NO: 903); ISSGLLSGRSDDH (SEQ ID NO: 904); ISSGLLSGRSDIH (SEQ ID NO: 905); ISSGLLSGRSDQH (SEQ ID NO: 906); ISSGLLSGRSDTH (SEQ ID NO: 907); ISSGLLSGRSDYH (SEQ ID NO: 908); ISSGLLSGRSDNP (SEQ ID NO: 909); ISSGLLSGRSANP (SEQ ID NO: 910); ISSGLLSGRSANI (SEQ ID NO: 911); AVGLLAPPGGLSGRSDDH (SEQ ID NO: 912); AVGLLAPPGGLSGRSDIH (SEQ ID NO: 913); AVGLLAPPGGLSGRSDQH (SEQ ID NO: 914); AVGLLAPPGGLSGRSDTH (SEQ ID NO: 915); AVGLLAPPGGLSGRSDYH (SEQ ID NO: 916); AVGLLAPPGGLSGRSDNP (SEQ ID NO: 917); AVGLLAPPGGLSGRSANP (SEQ ID NO: 918); AVGLLAPPGGLSGRSANI (SEQ ID NO: 919); ISSGLLSGRSDNI (SEQ ID NO: 920); AVGLLAPPGGLSGRSDNI (SEQ ID NO: 921); GLSGRSDNHGGAVGLLAPP (SEQ ID NO: 1009); and/or GLSGRSDNHGGVHMPLGFLGP (SEQ ID NO: 1010).

[0196] In some embodiments, the CM1-CM2 substrate includes the sequence ISSGLLSGRSDNH (SEQ ID NO: 377), which is also referred to herein as substrate 2001. In some embodiments, the CM1-CM2 substrate includes the sequence ISSGLLSSGGSGGSLSGRSDNH (SEQ ID NO: 378), which is also referred to herein as substrate 1001/LP′/0001, where LP′ as used in this CM1-CM2 substrate is the amino acid sequence GGSGGS (SEQ ID NO: 922). In some embodiments, the CM1-CM2 substrate includes the sequence AVGLLAPPGGTSTSGRSANPRG (SEQ ID NO: 379), which is also referred to herein as substrate 2015 and/or substrate 1004/LP′/0003, where LP′ as used in this CM1-CM2 substrate is the amino acid sequence GG. In some embodiments, the CM1-CM2 substrate includes the sequence TSTSGRSANPRGGGAVGLLAPP (SEQ ID NO: 380), which is also referred to herein as substrate 0003/LP′/1004, where LP′ as used in this CM1-CM2 substrate is the amino acid sequence GG. In some embodiments, the CM1-CM2 substrate includes the sequence VHMPLGFLGPGGTSTSGRSANPRG (SEQ ID NO: 381), which is also referred to herein as substrate 1003/LP′/0003, where LP′ as used in this CM1-CM2 substrate is the amino acid sequence GG. In some embodiments, the CM1-CM2 substrate includes the sequence TSTSGRSANPRGGGVHMPLGFLGP (SEQ ID NO: 382), which is also referred to herein as substrate 0003/LP′/1003, where LP′ as used in this CM1-CM2 substrate is the amino acid sequence GG. In some embodiments, the CM1-CM2 substrate includes the sequence AVGLLAPPGGLSGRSDNH (SEQ ID NO: 383), which is also referred to herein as substrate 3001 and/or substrate 1004/LP′/0001, where LP′ as used in this CM1-CM2 substrate is the amino acid sequence GG. In some embodiments, the CM1-CM2 substrate includes the sequence LSGRSDNHGGAVGLLAPP (SEQ ID NO: 384), which is also referred to herein as substrate 0001/LP′/1004, where LP′ as used in this CM1-CM2 substrate is the amino acid sequence GG. In some embodiments, the CM1-CM2 substrate includes the sequence VHMPLGFLGPGGLSGRSDNH (SEQ ID NO: 385), which is also referred to herein as substrate 1003/LP′/0001, wherein LP′ as used in this CM1-CM2 substrate is the amino acid sequence GG. In some embodiments, the CM1-CM2 substrate includes the sequence LSGRSDNHGGVHMPLGFLGP (SEQ ID NO: 386), which is also referred to herein as substrate 0001/LP′/1003, where LP′ as used in this CM1-CM2 substrate is the amino acid sequence GG. In some embodiments, the CM1-CM2 substrate includes the sequence LSGRSDNHGGSGGSISSGLLSS (SEQ ID NO: 387), which is also referred to herein as substrate 0001/LP′/1001, where LP′ as used in this CM1-CM2 substrate is the amino acid sequence GGSGGS (SEQ ID NO: 922). In some embodiments, the CM-CM2 substrate includes the sequence LSGRSGNHGGSGGSISSGLLSS (SEQ ID NO: 388), which is also referred to herein as substrate 0002/LP′/1001, where LP′ as used in this CM1-CM2 substrate is the amino acid sequence GGSGGS (SEQ ID NO: 922). In some embodiments, the CM-CM2 substrate includes the sequence ISSGLLSSGGSGGSLSGRSGNH (SEQ ID NO: 389), which is also referred to herein as substrate 1001/LP′/0002, where LP′ as used in this CM1-CM2 substrate is the amino acid sequence GGSGGS (SEQ ID NO: 922). In some embodiments, the CM1-CM2 substrate includes the sequence LSGRSDNHGGSGGSQNQALRMA (SEQ ID NO: 390), which is also referred to herein as substrate 0001/LP′/1002, where LP′ as used in this CM1-CM2 substrate is the amino acid sequence GGSGGS (SEQ ID NO: 922). In some embodiments, the CM1-CM2 substrate includes the sequence QNQALRMAGGSGGSLSGRSDNH (SEQ ID NO: 391), which is also referred to herein as substrate 1002/LP′/0001, where LP′ as used in this CM1-CM2 substrate is the amino acid sequence GGSGGS (SEQ ID NO: 922). In some embodiments, the CM1-CM2 substrate includes the sequence LSGRSGNHGGSGGSQNQALRMA (SEQ ID NO: 392), which is also referred to herein as substrate 0002/LP′/1002, where LP′ as used in this CM1-CM2 substrate is the amino acid sequence GGSGGS (SEQ ID NO: 922). In some embodiments, the CM-CM2 substrate includes the sequence QNQALRMAGGSGGSLSGRSGNH (SEQ ID NO: 393), which is also referred to herein as substrate 1002/LP′/0002, where LP′ as used in this CM1-CM2 substrate is the amino acid sequence GGSGGS (SEQ ID NO: 922). In some embodiments, the CM-CM2 substrate includes the sequence ISSGLLSGRSGNH (SEQ ID NO: 394), which is also referred to herein as substrate 2002. In some embodiments, the CM1-CM2 substrate includes the sequence ISSGLLSGRSANPRG (SEQ ID NO: 901), which is also referred to herein as substrate 2003. In some embodiments, the CM1-CM2 substrate includes the sequence AVGLLAPPTSGRSANPRG (SEQ ID NO: 902), which is also referred to herein as substrate 2004. In some embodiments, the CM1-CM2 substrate includes the sequence AVGLLAPPSGRSANPRG (SEQ ID NO: 903), which is also referred to herein as substrate 2005. In some embodiments, the CM1-CM2 substrate includes the sequence ISSGLLSGRSDDH (SEQ ID NO: 904), which is also referred to herein as substrate 2006. In some embodiments, the CM1-CM2 substrate includes the sequence ISSGLLSGRSDIH (SEQ ID NO: 905), which is also referred to herein as substrate 2007. In some embodiments, the CM1-CM2 substrate includes the sequence ISSGLLSGRSDQH (SEQ ID NO: 906), which is also referred to herein as substrate 2008. In some embodiments, the CM1-CM2 substrate includes the sequence ISSGLLSGRSDTH (SEQ ID NO: 907), which is also referred to herein as substrate 2009. In some embodiments, the CM1-CM2 substrate includes the sequence ISSGLLSGRSDYH (SEQ ID NO: 908), which is also referred to herein as substrate 2010. In some embodiments, the CM1-CM2 substrate includes the sequence ISSGLLSGRSDNP (SEQ ID NO: 909), which is also referred to herein as substrate 2011. In some embodiments, the CM1-CM2 substrate includes the sequence ISSGLLSGRSANP (SEQ ID NO: 910), which is also referred to herein as substrate 2012. In some embodiments, the CM1-CM2 substrate includes the sequence ISSGLLSGRSANI (SEQ ID NO: 911), which is also referred to herein as substrate 2013. In some embodiments, the CM1-CM2 substrate includes the sequence AVGLLAPPGGLSGRSDDH (SEQ ID NO: 912), which is also referred to herein as substrate 3006. In some embodiments, the CM1-CM2 substrate includes the sequence AVGLLAPPGGLSGRSDIH (SEQ ID NO: 913), which is also referred to herein as substrate 3007. In some embodiments, the CM1-CM2 substrate includes the sequence AVGLLAPPGGLSGRSDQH (SEQ ID NO: 914), which is also referred to herein as substrate 3008. In some embodiments, the CM1-CM2 substrate includes the sequence AVGLLAPPGGLSGRSDTH (SEQ ID NO: 915), which is also referred to herein as substrate 3009. In some embodiments, the CM1-CM2 substrate includes the sequence AVGLLAPPGGLSGRSDYH (SEQ ID NO: 916), which is also referred to herein as substrate 3010. In some embodiments, the CM1-CM2 substrate includes the sequence AVGLLAPPGGLSGRSDNP (SEQ ID NO: 917), which is also referred to herein as substrate 3011. In some embodiments, the CM1-CM2 substrate includes the sequence AVGLLAPPGGLSGRSANP (SEQ ID NO: 918), which is also referred to herein as substrate 3012. In some embodiments, the CM1-CM2 substrate includes the sequence AVGLLAPPGGLSGRSANI (SEQ ID NO: 919), which is also referred to herein as substrate 3013. In some embodiments, the CM1-CM2 substrate includes the sequence ISSGLLSGRSDNI (SEQ ID NO: 920), which is also referred to herein as substrate 2014. In some embodiments, the CM1-CM2 substrate includes the sequence AVGLLAPPGGLSGRSDNI (SEQ ID NO: 921), which is also referred to herein as substrate 3014. In some embodiments, the CM1-CM2 substrate includes the sequence GLSGRSDNHGGAVGLLAPP (SEQ ID NO: 1009), which is also referred to herein as substrate 0001/LP′/1004, where LP′ as used in this CM1-CM2 substrate is the amino acid sequence GG. In some embodiments, the CM1-CM2 substrate includes the sequence GLSGRSDNHGGVHMPLGFLGP (SEQ ID NO: 1010), which is also referred to herein as substrate 0001/LP′/1003, where LP′ as used in this CM1-CM2 substrate is the amino acid sequence GG.

[0197] In some embodiments, the CM is a substrate for at least two proteases. In some embodiments, each protease is selected from the group consisting of those shown in Table 12. In some embodiments, the CM is a substrate for at least two proteases, wherein one of the proteases is selected from the group consisting of a MMP, a thrombin, a neutrophil elastase, a cysteine protease, a uPA, a legumain and a matriptase and other serine proteases and the other protease is selected from the group consisting of those shown in Table 12. In some embodiments, the CM is a substrate for at least two proteases selected from the group consisting of a MMP, a thrombin, a neutrophil elastase, a cysteine protease, a uPA, a legumain and a matriptase and other serine proteases.

[0198] In some embodiments, the activatable antibody includes at least a first CM and a second CM. In some embodiments, the first CM and the second CM are each polypeptides of no more than 15 amino acids long. In some embodiments, the first CM and the second CM in the activatable antibody in the uncleaved state have the structural arrangement from N-terminus to C-terminus as follows: MM-CM1-CM2-AB or AB-CM2-CM1-MM. In some embodiments, at least one of the first CM and the second CM is a polypeptide that functions as a substrate for a protease selected from the group consisting of a MMP, a thrombin, a neutrophil elastase, a cysteine protease, a uPA, a legumain, and a matriptase and other serine proteases. In some embodiments, the first CM is cleaved by a first cleaving agent selected from the group consisting of a MMP, a thrombin, a neutrophil elastase, a cysteine protease, a uPA, a legumain, and a matriptase and other serine proteases in a target tissue and the second CM is cleaved by a second cleaving agent in a target tissue. In some embodiments, the other protease is selected from the group consisting of those shown in Table 12. In some embodiments, the first cleaving agent and the second cleaving agent are the same protease selected from the group consisting of a MMP, a thrombin, a neutrophil elastase, a cysteine protease, a uPA, a legumain, and a matriptase and other serine proteases, and the first CM and the second CM are different substrates for the enzyme. In some embodiments, the first cleaving agent and the second cleaving agent are the same protease selected from the group consisting of those shown in Table 12. In some embodiments, the first cleaving agent and the second cleaving agent are different proteases. In some embodiments, the first cleaving agent and the second cleaving agent are co-localized in the target tissue. In some embodiments, the first CM and the second CM are cleaved by at least one cleaving agent in the target tissue.

[0199] In some embodiments, the activatable antibody is exposed to and cleaved by a protease such that, in the activated or cleaved state, the activated antibody includes a light chain amino acid sequence that includes at least a portion of LP2 and/or CM sequence after the protease has cleaved the CM.

[0200] In some embodiments, the activatable antibody also includes an agent conjugated to the AB. In some embodiments, the agent conjugated to the AB or the AB of an activatable antibody is a therapeutic agent. In some embodiments, the agent is an antineoplastic agent. In some embodiments, the agent is a toxin or fragment thereof. As used herein, a fragment of a toxin is a fragment that retains toxic activity. In some embodiments, the agent is conjugated to the AB via a cleavable linker. In some embodiments, the agent is conjugated to the AB via a linker that includes at least one CM1-CM2 substrate sequence. In some embodiments, the agent is conjugated to the AB via a noncleavable linker. In some embodiments, the agent is conjugated to the AB via a linker that is cleavable in an intracellular or lysosomal environment. In some embodiments, the agent is a microtubule inhibitor. In some embodiments, the agent is a nucleic acid damaging agent, such as a DNA alkylator, a DNA cleaving agent, a DNA cross-linker, or DNA intercalator, or other DNA damaging agent. In some embodiments, the agent is an agent selected from the group listed in Table 11. In some embodiments, the agent is a dolastatin. In some embodiments, the agent is an auristatin or derivative thereof. In some embodiments, the agent is auristatin E or a derivative thereof. In some embodiments, the agent is monomethyl auristatin E (MMAE). In some embodiments, the agent is monomethyl auristatin D (MMAD). In some embodiments, the agent is a maytansinoid or maytansinoid derivative. In some embodiments, the agent is DM1 or DM4. In some embodiments, the agent is a duocarmycin or derivative thereof. In some embodiments, the agent is a calicheamicin or derivative thereof. In some embodiments, the agent is a pyrrolobenzodiazepine. In some embodiments, the agent is a pyrrolobenzodiazepine dimer.

[0201] In some embodiments, the activatable antibody is conjugated to one or more equivalents of an agent. In some embodiments, the activatable antibody is conjugated to one equivalent of the agent. In some embodiments, the activatable antibody is conjugated to two, three, four, five, six, seven, eight, nine, ten, or greater than ten equivalents of the agent. In some embodiments, the activatable antibody is part of a mixture of activatable antibodies having a homogeneous number of equivalents of conjugated agents. In some embodiments, the activatable antibody is part of a mixture of activatable antibodies having a heterogeneous number of equivalents of conjugated agents. In some embodiments, the mixture of activatable antibodies is such that the average number of agents conjugated to each activatable antibody is between zero to one, between one to two, between two and three, between three and four, between four and five, between five and six, between six and seven, between seven and eight, between eight and nine, between nine and ten, and ten and greater. In some embodiments, the mixture of activatable antibodies is such that the average number of agents conjugated to each activatable antibody is one, two, three, four, five, six, seven, eight, nine, ten, or greater.

[0202] In some embodiments, the activatable antibody comprises one or more site-specific amino acid sequence modifications such that the number of lysine and/or cysteine residues is increased or decreased with respect to the original amino acid sequence of the activatable antibody, thus in some embodiments correspondingly increasing or decreasing the number of agents that can be conjugated to the activatable antibody, or in some embodiments limiting the conjugation of the agents to the activatable antibody in a site-specific manner. In some embodiments, the modified activatable antibody is modified with one or more non-natural amino acids in a site-specific manner, thus in some embodiments limiting the conjugation of the agents to only the sites of the non-natural amino acids.

[0203] In some embodiments, the agent is an anti-inflammatory agent.

[0204] In some embodiments, the activatable antibody also includes a detectable moiety. In some embodiments, the detectable moiety is a diagnostic agent.

[0205] In some embodiments, the activatable antibody also includes a signal peptide. In some embodiments, the signal peptide is conjugated to the activatable antibody via a spacer. In some embodiments, the spacer is conjugated to the activatable antibody in the absence of a signal peptide. In some embodiments, the spacer is joined directly to the MM of the activatable antibody. In some embodiments, the spacer is joined directly to the MM of the activatable antibody in the structural arrangement from N-terminus to C-terminus of spacer-MM-CM-AB. An example of a spacer joined directly to the N-terminus of MM of the activatable antibody is selected from the group consisting of QGQSGS (SEQ ID NO: 923), GQSGS (SEQ ID NO: 1192); QSGS (SEQ ID NO: 1193); SGS (SEQ ID NO: 1194); GS (SEQ ID NO: 1195); S; QGQSGQG (SEQ ID NO: 924); GQSGQG (SEQ ID NO: 395); QSGQG (SEQ ID NO: 925); SGQG (SEQ ID NO: 926); GQG (SEQ ID NO: 927); QG (SEQ ID NO: 928); G; QGQSGQ (SEQ ID NO: 1196); GQSGQ (SEQ ID NO: 1197); QSGQ (SEQ ID NO: 1198); SGQ (SEQ ID NO: 1198); GQ (SEQ ID NO: 1199); and Q. In some embodiments, the spacer includes at least the amino acid sequence QGQSGS (SEQ ID NO: 923). In some embodiments, the spacer includes at least the amino acid sequence GQSGS (SEQ ID NO: 1192). In some embodiments, the spacer includes at least the amino acid sequence QSGS (SEQ ID NO: 1193). In some embodiments, the spacer includes at least the amino acid sequence SGS (SEQ ID NO: 1194). In some embodiments, the spacer includes at least the amino acid sequence GS (SEQ ID NO: 1195). In some embodiments, the spacer includes at least the amino acid sequence S. In some embodiments, the spacer includes at least the amino acid sequence QGQSGQG (SEQ ID NO: 924). In some embodiments, the spacer includes at least the amino acid sequence GQSGQG (SEQ ID NO: 395). In some embodiments, the spacer includes at least the amino acid sequence QSGQG (SEQ ID NO: 925). In some embodiments, the spacer includes at least the amino acid sequence SGQG (SEQ ID NO: 926). In some embodiments, the spacer includes at least the amino acid sequence GQG (SEQ ID NO: 927). In some embodiments, the spacer includes at least the amino acid sequence QG (SEQ ID NO: 928). In some embodiments, the spacer includes at least the amino acid sequence G. In some embodiments, the spacer includes at least the amino acid sequence QGQSGQ (SEQ ID NO: 1196). In some embodiments, the spacer includes at least the amino acid sequence GQSGQ (SEQ ID NO: 1197). In some embodiments, the spacer includes at least the amino acid sequence QSGQ (SEQ ID NO: 1198). In some embodiments, the spacer includes at least the amino acid sequence SGQ (SEQ ID NO: 1198). In some embodiments, the spacer includes at least the amino acid sequence GQ (SEQ ID NO: 1199). In some embodiments, the spacer includes at least the amino acid sequence Q. In some embodiments, the activatable antibody does not include a spacer sequence.

[0206] In some embodiments, the AB of the activatable antibody naturally contains one or more disulfide bonds. In some embodiments, the AB can be engineered to include one or more disulfide bonds.

[0207] In some embodiments, the serum half-life of the activatable antibody is longer than that of the corresponding antibody, e.g., the pK of the activatable antibody is longer than that of the corresponding antibody. In some embodiments, the serum half-life of the activatable antibody is similar to that of the corresponding antibody. In some embodiments, the serum half-life of the activatable antibody is at least 15 days when administered to an organism. In some embodiments, the serum half-life of the activatable antibody is at least 12 days when administered to an organism. In some embodiments, the serum half-life of the activatable antibody is at least 11 days when administered to an organism. In some embodiments, the serum half-life of the activatable antibody is at least 10 days when administered to an organism. In some embodiments, the serum half-life of the activatable antibody is at least 9 days when administered to an organism. In some embodiments, the serum half-life of the activatable antibody is at least 8 days when administered to an organism. In some embodiments, the serum half-life of the activatable antibody is at least 7 days when administered to an organism. In some embodiments, the serum half-life of the activatable antibody is at least 6 days when administered to an organism. In some embodiments, the serum half-life of the activatable antibody is at least 5 days when administered to an organism. In some embodiments, the serum half-life of the activatable antibody is at least 4 days when administered to an organism. In some embodiments, the serum half-life of the activatable antibody is at least 3 days when administered to an organism. In some embodiments, the serum half-life of the activatable antibody is at least 2 days when administered to an organism. In some embodiments, the serum half-life of the activatable antibody is at least 24 hours when administered to an organism. In some embodiments, the serum half-life of the activatable antibody is at least 20 hours when administered to an organism. In some embodiments, the serum half-life of the activatable antibody is at least 18 hours when administered to an organism. In some embodiments, the serum half-life of the activatable antibody is at least 16 hours when administered to an organism. In some embodiments, the serum half-life of the activatable antibody is at least 14 hours when administered to an organism. In some embodiments, the serum half-life of the activatable antibody is at least 12 hours when administered to an organism. In some embodiments, the serum half-life of the activatable antibody is at least 10 hours when administered to an organism. In some embodiments, the serum half-life of the activatable antibody is at least 8 hours when administered to an organism. In some embodiments, the serum half-life of the activatable antibody is at least 6 hours when administered to an organism. In some embodiments, the serum half-life of the activatable antibody is at least 4 hours when administered to an organism. In some embodiments, the serum half-life of the activatable antibody is at least 3 hours when administered to an organism.

[0208] In some embodiments, the activatable anti-PDL1 antibody and/or conjugated activatable anti-PDL1 antibody is monospecific. In some embodiments, the activatable anti-PDL1 antibody and/or conjugated activatable anti-PDL1 antibody is multispecific, e.g., by way of non-limiting example, bispecific or trifunctional. In some embodiments, the activatable anti-PDL1 antibody and/or conjugated activatable anti-PDL1 antibody is formulated as part of a pro-Bispecific T Cell Engager (BITE) molecule, i.e., the BITE includes a masking moiety and a cleavable moiety. In some embodiments, the activatable anti-PDL1 antibody and/or conjugated activatable anti-PDL1 antibody is formulated as part of a pro-Chimeric Antigen Receptor (CAR)-modified T cell, -modified NK cell, or other-modified immune effector cell. In some embodiments, an activatable anti-PDL1 antibody is formulated as part of another engineered receptor on an immune effector cell; i.e., the pro-CAR or other pro-engineered receptor includes a masking moiety and a cleavable moiety.

[0209] In some embodiments, the activatable antibody or antigen-binding fragment thereof is incorporated in a multispecific activatable antibody or antigen-binding fragment thereof, where at least one arm of the multi specific activatable antibody specifically binds PDL1. In some embodiments, the activatable antibody or antigen-binding fragment thereof is incorporated in a bispecific antibody or antigen-binding fragment thereof, where at least one arm of the bispecific activatable antibody specifically binds PDL1.

[0210] In some embodiments, at least one arm of the multispecific activatable antibody, e.g., a bispecific activatable antibody, comprises a heavy chain amino acid sequence selected from the group consisting of SEQ ID NO: 14, 16, 18, 20, 22, 24, 26, 28, 30, 32, 34, 36, 38, 40, 42, 44, 46, 48, 50, 52, 54, and 56. In some embodiments, at least one arm of the multispecific activatable antibody, e.g., a bispecific activatable antibody, comprises a light chain amino acid sequence comprising SEQ ID NO: 12 or SEQ ID NO: 58. In some embodiments, at least one arm of the multispecific activatable antibody, e.g., a bispecific activatable antibody, comprises a light chain amino acid sequence comprising SEQ ID NO: 12. In some embodiments, at least one arm of the multispecific activatable antibody, e.g., a bispecific activatable antibody, comprises a light chain amino acid sequence comprising SEQ ID NO: 58.

[0211] In some embodiments, at least one arm of the multispecific activatable antibody, e.g., a bispecific activatable antibody, a heavy chain amino acid sequence comprising an amino acid sequence selected from the group consisting of SEQ ID NO: 46, 48, 50, 52, 54, and 56, and a light chain amino acid sequence comprising SEQ ID NO: 58.

[0212] In some embodiments, at least one arm of the multispecific activatable antibody, e.g., a bispecific activatable antibody, comprises a heavy chain amino acid sequence comprising an amino acid sequence selected from the group consisting of SEQ ID NO: 46, 48, 50, 52, 54, and 56, and a light chain amino acid sequence comprising SEQ ID NO: 12.

[0213] In some embodiments, at least one arm of the multispecific activatable antibody, e.g., a bispecific activatable antibody, comprises a heavy chain amino acid sequence that is at least 90%, 91%, 92%, 93%, 94%, 95%, 96%, 97%, 98% or 99% identical to an amino acid sequence selected from the group consisting of SEQ ID NO: 14, 16, 18, 20, 22, 24, 26, 28, 30, 32, 34, 36, 38, 40, 42, 44, 46, 48, 50, 52, 54, and 56. In some embodiments, at least one arm of the multispecific activatable antibody, e.g., a bispecific activatable antibody, comprises a light chain amino acid that is at least 90%, 91%, 92%, 93%, 94%, 95%, 96%, 97%, 98% or 99% identical to the amino acid sequence of SEQ ID NO: 58. In some embodiments, at least one arm of the multispecific activatable antibody, e.g., a bispecific activatable antibody, comprises a light chain amino acid that is at least 90%, 91%, 92%, 93%, 94%, 95%, 96%, 97%, 98% or 99% identical to the amino acid sequence of SEQ ID NO: 12. In some embodiments, at least one arm of the multispecific activatable antibody, e.g., a bispecific activatable antibody, comprises a heavy chain amino acid sequence that is at least 90%, 91%, 92%, 93%, 94%, 95%, 96%, 97%, 98% or 99% identical to an amino acid sequence selected from the group consisting of SEQ ID NO: 46, 48, 50, 52, 54, and 56, and a light chain amino acid that is at least 90%, 91%, 92%, 93%, 94%, 95%, 96%, 97%, 98% or 99% identical to the amino acid sequence of SEQ ID NO: 58. In some embodiments, at least one arm of the multispecific activatable antibody, e.g., a bispecific activatable antibody, comprises a heavy chain amino acid sequence that is at least 90%, 91%, 92%, 93%, 94%, 95%, 96%, 97%, 98% or 99% identical to an amino acid sequence selected from the group consisting of SEQ ID NO: 46, 48, 50, 52, 54, and 56, and a light chain amino acid that is at least 90%, 91%, 92%, 93%, 94%, 95%, 96%, 97%, 98% or 99% identical to the amino acid sequence of SEQ ID NO: 12.

[0214] In some embodiments, at least one arm of the multispecific activatable antibody, e.g., a bispecific activatable antibody, comprises the heavy chain amino acid sequence of SEQ ID NO: 46 and the light chain amino acid sequence of SEQ ID NO: 58. In some embodiments, at least one arm of the multispecific activatable antibody, e.g., a bispecific activatable antibody, comprises the heavy chain amino acid sequence of SEQ ID NO: 46 and the light chain amino acid sequence of SEQ ID NO: 12.

[0215] In some embodiments, at least one arm of the multispecific activatable antibody, e.g., a bispecific activatable antibody, comprises a heavy chain amino acid sequence that is at least 90%, 91%, 92%, 93%, 94%, 95%, 96%, 97%, 98% or 99% identical to the amino acid of SEQ ID NO: 46. In some embodiments, at least one arm of the multispecific activatable antibody, e.g., a bispecific activatable antibody, comprises a light chain amino acid that is at least 90%, 91%, 92%, 93%, 94%, 95%, 96%, 97%, 98% or 99% identical to the amino acid sequence of SEQ ID NO: 58. In some embodiments, at least one arm of the multispecific activatable antibody, e.g., a bispecific activatable antibody, comprises a light chain amino acid that is at least 90%, 91%, 92%, 93%, 94%, 95%, 96%, 97%, 98% or 99% identical to the amino acid sequence of SEQ ID NO: 12. In some embodiments, at least one arm of the multispecific activatable antibody, e.g., a bispecific activatable antibody, comprises a heavy chain amino acid sequence that is at least 90%, 91%, 92%, 93%, 94%, 95%, 96%, 97%, 98% or 99% identical to the amino acid sequence selected of SEQ ID NO: 46, and a light chain amino acid that is at least 90%, 91%, 92%, 93%, 94%, 95%, 96%, 97%, 98% or 99% identical to the amino acid sequence of SEQ ID NO: 58. In some embodiments, at least one arm of the multispecific activatable antibody, e.g., a bispecific activatable antibody, comprises a heavy chain amino acid sequence that is at least 90%, 91%, 92%, 93%, 94%, 95%, 96%, 97%, 98% or 99% identical to the amino acid sequence selected of SEQ ID NO: 46, and a light chain amino acid that is at least 90%, 91%, 92%, 93%, 94%, 95%, 96%, 97%, 98% or 99% identical to the amino acid sequence of SEQ ID NO: 12.

[0216] In some embodiments, at least one arm of the multispecific activatable antibody, e.g., a bispecific activatable antibody, comprises a combination of a variable heavy chain complementarity determining region 1 (VH CDR1, also referred to herein as CDRH1) sequence, a variable heavy chain complementarity determining region 2 (VH CDR2, also referred to herein as CDRH2) sequence, a variable heavy chain complementarity determining region 3 (VH CDR3, also referred to herein as CDRH3) sequence, a variable light chain complementarity determining region 1 (VL CDR1, also referred to herein as CDRL1) sequence, a variable light chain complementarity determining region 2 (VL CDR2, also referred to herein as CDRL2) sequence, and a variable light chain complementarity determining region 3 (VL CDR3, also referred to herein as CDRL3) sequence, wherein at least one CDR sequence is selected from the group consisting of a VH CDR1 sequence shown in Table 16; a VH CDR2 sequence shown in Table 16; a VH CDR3 sequence shown in Table 16; a VL CDR1 sequence shown in Table 16; a VL CDR2 sequence shown in Table 16; and a VL CDR3 sequence shown in Table 16.

[0217] In some embodiments, at least one arm of the multispecific activatable antibody, e.g., a bispecific activatable antibody, comprises a combination of a VH CDR1 sequence, a VH CDR2 sequence, a VH CDR3 sequence, a VL CDR1 sequence, a VL CDR2 sequence, and a VL CDR3 sequence, wherein at least one CDR sequence is selected from the group consisting of a VH CDR1 sequence that includes a sequence that is at least 90%, 91%, 92%, 93%, 94%, 95%, 96%, 97%, 98%, 99% or more identical to a VH CDR1 sequence shown in Table 16; a VH CD2 sequence that includes a sequence that is at least 90%, 91%, 92%, 93%, 94%, 95%, 96%, 97%, 98%, 99% or more identical to a VH CDR2 sequence shown in Table 16; a VH CDR3 sequence that includes a sequence that is at least 90%, 91%, 92%, 93%, 94%, 95%, 96%, 97%, 98%, 99% or more identical to a VH CDR3 sequence shown in Table 16; a VL CDR1 sequence that includes a sequence that is at least 90%, 91%, 92%, 93%, 94%, 95%, 96%, 97%, 98%, 99% or more identical to a VL CDR1 sequence shown in Table 16; a VL CDR2 sequence that includes a sequence that is at least 90%, 91%, 92%, 93%, 94%, 95%, 96%, 97%, 98%, 99% or more identical to a VL CDR2 sequence shown in Table 16; and a VL CDR3 sequence that includes a sequence that is at least 90%, 91%, 92%, 93%, 94%, 95%, 96%, 97%, 98%, 99% or more identical to a VL CDR3 sequence shown in Table 16.

[0218] In some embodiments, at least one arm of the multispecific activatable antibody, e.g., a bispecific activatable antibody, comprises a combination of a VH CDR1 sequence, a VH CDR2 sequence, a VH CDR3 sequence, a VL CDR1 sequence, a VL CDR2 sequence, and a VL CDR3 sequence, wherein the combination is a combination of the six CDR sequences (VH CDR1, VH CDR2, VH CDR3, VL CDR1, VL CDR2, and VL CDR3) shown in a single row in Table 16.

[0219] In some embodiments, the antibody comprises a heavy chain that comprise a combination of a VH CDR1 sequence, a VH CDR2 sequence, and a VH CDR3 sequence, wherein the combination is a combination of the three heavy chain CDR sequences (VH CDR1, VH CDR2, VH CDR3) shown in a single row in Table 16.

[0220] In some embodiments, at least one arm of the multispecific activatable antibody. e.g., a bispecific activatable antibody, comprises a combination of a VH CDR1 sequence, a VH CDR2 sequence, a VH CDR3 sequence, a VL CDR1 sequence, a VL CDR2 sequence, and a VL CDR3 sequence, wherein each CDR sequence in the combination comprises a sequence that is at least 90%, 91%, 92%, 93%, 94%, 95%, 96%, 97%, 98%, 99% or more identical to the corresponding CDR sequence in a combination of the six CDR sequences (VH CDR1, VH CDR2, VH CDR3, VL CDR1, VL CDR2, and VL CDR3) shown in a single row in Table 16.

[0221] In some embodiments, the antibody comprises a heavy chain that comprise a combination of a VH CDR1 sequence, a VH CDR2 sequence, and a VH CDR3 sequence, wherein each CDR sequence in the combination comprises a sequence that is at least 90%, 91%, 92%, 93%, 94%, 95%, 96%, 97%, 98%, 99% or more identical to the corresponding CDR sequence in a combination of three heavy chain CDR sequences (VH CDR1, VH CDR2, VH CDR3) shown in a single row in Table 16.

[0222] In some embodiments, at least one arm of the multispecific activatable antibody, e.g., a bispecific activatable antibody, comprises a combination of a VH CDR1 sequence, a VH CDR2 sequence, a VH CDR3 sequence, a VL CDR1 sequence, a VL CDR2 sequence, and a VL CDR3 sequence, wherein at least one CDR sequence is selected from the group consisting of a VL CDR1 sequence comprising RASQSISSYLN (SEQ ID NO: 209); a VL CDR2 sequence comprising AASSLQS (SEQ ID NO: 215), a VL CDR3 sequence comprising DNGYPST (SEQ ID NO: 228); a VH CDR1 sequence comprising SYAMS (SEQ ID NO: 212); a VH CDR2 sequence comprising SSIWRNGIVTVYADS (SEQ ID NO: 246); and a VH CDR3 sequence comprising WSAAFDY (SEQ ID NO: 235).

[0223] In some embodiments, at least one arm of the multispecific activatable antibody, e.g., a bispecific activatable antibody, comprises a combination of a VH CDR1 sequence, a VH CDR2 sequence, a VH CDR3 sequence, a VL CDR1 sequence, a VL CDR2 sequence, and a VL CDR3 sequence, wherein the VH CDR2 sequence comprises SSIWRNGIVTVYADS (SEQ ID NO: 246). In some embodiments, at least one arm of the multispecific activatable antibody, e.g., a bispecific activatable antibody, comprises a combination of a VH CDR1 sequence, a VH CDR2 sequence, a VH CDR3 sequence, a VL CDR1 sequence, a VL CDR2 sequence, and a VL CDR3 sequence, wherein the VH CDR3 sequence comprises WSAAFDY (SEQ ID NO: 235). In some embodiments, at least one arm of the multispecific activatable antibody, e.g., a bispecific activatable antibody, comprises a combination of a VH CDR1 sequence, a VH CDR2 sequence, a VH CDR3 sequence, a VL CDR1 sequence, a VL CDR2 sequence, and a VL CDR3 sequence, wherein the VH CDR2 sequence comprises SSIWRNGIVTVYADS (SEQ ID NO: 246), and the VH CDR3 sequence comprises WSAAFDY (SEQ ID NO: 235).

[0224] In some embodiments, at least one arm of the multispecific activatable antibody, e.g., a bispecific activatable antibody, comprises a combination of a VH CDR1 sequence, a VH CDR2 sequence, a VH CDR3 sequence, a VL CDR1 sequence, a VL CDR2 sequence, and a VL CDR3 sequence, wherein the combination comprises a VL CDR1 sequence comprising RASQSISSYLN (SEQ ID NO: 209); a VL CDR2 sequence comprising AASSLQS (SEQ ID NO: 215); a VL CDR3 sequence comprising DNGYPST (SEQ ID NO: 228); a VH CDR1 sequence comprising SYAMS (SEQ ID NO: 212); a VH CDR2 sequence comprising SSIWRNGIVTVYADS (SEQ ID NO: 246); and a VH CDR3 sequence comprising WSAAFDY (SEQ ID NO: 235).

[0225] In some embodiments, the anti-PDL1 antibodies, conjugated anti-PDL1 antibodies, activatable anti-PDL1 antibodies and/or conjugated activatable anti-PDL1 antibodies described herein are used as sole active agents. In some embodiments, the anti-PDL1 antibodies, conjugated anti-PDL1 antibodies, activatable anti-PDL1 antibodies and/or conjugated activatable anti-PDL1 antibodies described herein are used in conjunction with one or more additional agents or a combination of additional agents. Suitable additional agents include current pharmaceutical and/or surgical therapies for an intended application, such as, for example, cancer. For example, the anti-PDL1 antibodies, conjugated anti-PDL1 antibodies, activatable anti-PDL1 antibodies and/or conjugated activatable anti-PDL1 antibodies can be used in conjunction with an additional chemotherapeutic or anti-neoplastic agent.

[0226] In some embodiments, the additional agent(s) is a chemotherapeutic agent, such as a chemotherapeutic agent selected from the group consisting of docetaxel, paclitaxel, abraxane (i.e., albumin-conjugated paclitaxel), doxorubicin, oxaliplatin, carboplatin, cisplatin, irinotecan, and gemcitabine.

[0227] In some embodiments, the additional agent(s) is a checkpoint inhibitor, a kinase inhibitor, an agent targeting inhibitors in the tumor microenvironment, and/or a T cell or NK agonist. In some embodiments, the additional agent(s) is radiation therapy, alone or in combination with another additional agent(s) such as a chemotherapeutic or anti-neoplastic agent. In some embodiments, the additional agent(s) is a vaccine, an oncovirus, and/or a DC-activating agent such as, by way of non-limiting example, a toll-like receptor (TLR) agonist and/or α-CD40. In some embodiments, the additional agent(s) is a tumor-targeted antibody designed to kill the tumor via ADCC or via direct conjugation to a toxin (e.g., an antibody drug conjugate (ADC).

[0228] In some embodiments, the checkpoint inhibitor is an inhibitor of a target selected from the group consisting of CTLA-4, LAG-3, PD1 (also referred to as PD-1), PDL1, TIGIT, TIM-3, B7H4, and Vista. In some embodiments, the kinase inhibitor is selected from the group consisting of B-RAFi, MEKi, and Btk inhibitors, such as ibrutinib. In some embodiments, the kinase inhibitor is crizotinib. In some embodiments, the tumor microenvironment inhibitor is selected from the group consisting of an IDO inhibitor, an α-CSF1R inhibitor, an α-CCR4 inhibitor, a TGF-beta, a myeloid-derived suppressor cell, or a T-regulatory cell. In some embodiments, the agonist is selected from the group consisting of Ox40, GITR, CD137, ICOS, CD27, and HVEM.

[0229] In some embodiments, the inhibitor is a CTLA-4 inhibitor. In some embodiments, the inhibitor is a LAG-3 inhibitor. In some embodiments, the inhibitor is a PD1 inhibitor. In some embodiments, the inhibitor is a PDL1 inhibitor. In some embodiments, the inhibitor is a TIGIT inhibitor. In some embodiments, the inhibitor is a TIM-3 inhibitor. In some embodiments, the inhibitor is a B7H4 inhibitor. In some embodiments, the inhibitor is a Vista inhibitor. In some embodiments, the inhibitor is a B-RAFi inhibitor. In some embodiments, the B-RAFi inhibitor is vemurafenib. In some embodiments, the inhibitor is a MEKi inhibitor. In some embodiments, the inhibitor is a Btk inhibitor. In some embodiments, the inhibitor is ibrutinib. In some embodiments, the inhibitor is crizotinib. In some embodiments, the inhibitor is an IDO inhibitor. In some embodiments, the inhibitor is an α-CSF1R inhibitor. In some embodiments, the inhibitor is an α-CCR4 inhibitor. In some embodiments, the inhibitor is a TGF-beta. In some embodiments, the inhibitor is a myeloid-derived suppressor cell. In some embodiments, the inhibitor is a T-regulatory cell.

[0230] In some embodiments, the agonist is Ox40. In some embodiments, the agonist is GITR. In some embodiments, the agonist is CD137. In some embodiments, the agonist is ICOS. In some embodiments, the agonist is CD27. In some embodiments, the agonist is HVEM.

[0231] In some embodiments, the anti-PDL1 antibody, conjugated antibody, activatable antibody and/or conjugated activatable antibody is administered before and/or during and/or after treatment in combination with one or more additional agents such as, for example, a chemotherapeutic agent, an anti-inflammatory agent, and/or an immunosuppressive agent. In some embodiments, the anti-PDL1 antibody, conjugated anti-PDL1 antibody, activatable anti-PDL1 antibody and/or conjugated activatable anti-PDL1 antibody and the additional agent are formulated into a single therapeutic composition, and the anti-PDL1 antibody, conjugated anti-PDL1 antibody, activatable anti-PDL1 antibody and/or conjugated activatable anti-PDL1 antibody and additional agent are administered simultaneously. Alternatively, the anti-PDL1 antibody, conjugated anti-PDL1 antibody, activatable anti-PDL1 antibody and/or conjugated activatable anti-PDL1 antibody and additional agent are separate from each other, e.g., each is formulated into a separate therapeutic composition, and the anti-PDL1 antibody, conjugated anti-PDL1 antibody, activatable anti-PDL1 antibody and/or conjugated activatable anti-PDL1 antibody and the additional agent are administered simultaneously, or the anti-PDL1 antibody, conjugated anti-PDL1 antibody, activatable anti-PDL1 antibody and/or conjugated activatable anti-PDL1 antibody and the additional agent are administered at different times during a treatment regimen. For example, the anti-PDL1 antibody, conjugated anti-PDL1 antibody, activatable anti-PDL1 antibody and/or conjugated activatable anti-PDL1 antibody is administered prior to the administration of the additional agent, the anti-PDL1 antibody, conjugated anti-PDL1 antibody, activatable anti-PDL1 antibody and/or conjugated activatable anti-PDL1 antibody is administered subsequent to the administration of the additional agent, or the anti-PDL1 antibody, conjugated anti-PDL1 antibody, activatable anti-PDL1 antibody and/or conjugated activatable anti-PDL1 antibody and the additional agent are administered in an alternating fashion. As described herein, the anti-PDL1 antibody, conjugated anti-PDL1 antibody, activatable anti-PDL1 antibody and/or conjugated activatable anti-PDL1 antibody and additional agent are administered in single doses or in multiple doses.

[0232] In some embodiments, the anti-PDL1 antibody, conjugated anti-PDL1 antibody, activatable anti-PDL1 antibody and/or conjugated activatable anti-PDL1 antibody and the additional agent(s) are administered simultaneously. For example, the anti-PDL1 antibody, conjugated anti-PDL1 antibody, activatable anti-PDL1 antibody and/or conjugated activatable anti-PDL1 antibody and the additional agent(s) can be formulated in a single composition or administered as two or more separate compositions. In some embodiments, the anti-PDL1 antibody, conjugated anti-PDL1 antibody, activatable anti-PDL1 antibody and/or conjugated activatable anti-PDL1 antibody and the additional agent(s) are administered sequentially, or the anti-PDL1 antibody, conjugated anti-PDL1 antibody, activatable anti-PDL1 antibody and/or conjugated activatable anti-PDL1 antibody and the additional agent are administered at different times during a treatment regimen.

[0233] In some embodiments, the anti-PDL1 antibody, conjugated anti-PDL1 antibody, activatable anti-PDL1 antibody and/or conjugated activatable anti-PDL1 antibody is administered before and/or during and/or after treatment in combination with one or more additional agents such as, by way of non-limiting example, a chemotherapeutic agent, an anti-inflammatory agent, and/or an immunosuppressive agent, such as an alkylating agent, an anti-metabolite, an anti-microtubule agent, a topoisomerase inhibitor, a cytotoxic antibiotic, and/or any other nucleic acid damaging agent. In some embodiments, the additional agent is a taxane, such as paclitaxel (e.g., Abraxane®). In some embodiments, the additional agent is an anti-metabolite, such as gemcitabine. In some embodiments, the additional agent is an alkylating agent, such as platinum-based chemotherapy, such as carboplatin or cisplatin. In some embodiments, the additional agent is a targeted agent, such as a kinase inhibitor, e.g., sorafenib or erlotinib. In some embodiments, the additional agent is a targeted agent, such as another antibody, e.g., a monoclonal antibody (e.g., bevacizumab), a bispecific antibody, or a multispecific antibody. In some embodiments, the additional agent is a proteosome inhibitor, such as bortezomib or carfilzomib. In some embodiments, the additional agent is an immune modulating agent, such as lenolidominde or IL-2. In some embodiments, the additional agent is radiation. In some embodiments, the additional agent is an agent considered standard of care by those skilled in the art. In some embodiments, the additional agent is a chemotherapeutic agent well known to those skilled in the art.

[0234] In some embodiments, the additional agent is another antibody or antigen-binding fragment thereof, another conjugated antibody or antigen-binding fragment thereof, another activatable antibody or antigen-binding fragment thereof and/or another conjugated activatable antibody or antigen-binding fragment thereof. In some embodiments the additional agent is another antibody or antigen-binding fragment thereof, another conjugated antibody or antigen-binding fragment thereof, another activatable antibody or antigen-binding fragment thereof and/or another conjugated activatable antibody or antigen-binding fragment thereof against the same target as the first antibody or antigen-binding fragment thereof, the first conjugated antibody or antigen-binding fragment thereof, activatable antibody or antigen-binding fragment thereof and/or a conjugated activatable antibody or antigen-binding fragment thereof, e.g., against PDL1. In some embodiments the additional agent is another antibody or antigen-binding fragment thereof, another conjugated antibody or antigen-binding fragment thereof, another activatable antibody or antigen-binding fragment thereof and/or another conjugated activatable antibody or antigen-binding fragment thereof against a target different than the target of the first antibody or antigen-binding fragment thereof, the first conjugated antibody or antigen-binding fragment thereof, activatable antibody or antigen-binding fragment thereof and/or a conjugated activatable antibody or antigen-binding fragment thereof (i.e., target other than PDL1). In some embodiments, the additional agent is a chimeric antigen receptor-modified T cell, -modified NK cell or other-modified immune effector cell or is another engineered receptor-modified immune effector cell. In some embodiments, the additional agent is a pro-chimeric antigen receptor-modified T cell, -modified NK cell, or other-modified immune effector cell or is another pro-engineered receptor-modified immune effector cell.

[0235] As a non-limiting example, the antibody or antigen-binding fragment and/or the AB of an activatable antibody is a binding partner for any target listed in Table 22. In some embodiments that additional agent is ipilimumab, a CTLA4-binding fragment of ipilimumab, and/or an ipilimumab activatable antibody.

TABLE 22
Exemplary Targets

1-92-LFA-3
Alpha-4 integrin
Alpha-V integrin
alpha4beta1 integrin
alpha4beta7 integrin
AGR2
Anti-Lewis-Y
Apelin J receptor
APRIL
B7-H4
BAFF
BTLA
C5 complement
C-242
CA9
CA19-9 (Lewis a)
Carbonic anhydrase 9
CD2
CD3
CD6
CD9
CD11a
CD19
CD20
CD22
CD24
CD25
CD27
CD28
CD30
CD33
CD38
CD40
CD40L
CD41
CD44
CD44v6
CD47
CD51
CD52
CD56
CD64
CD70
CD71
CD74
CD80
CD81
CD86
CD95
CD117
CD125
CD132 (IL-2RG)
CD133
CD137
CD138
CD166
CD172A
CD248
CDH6
CEACAM5 (CEA)
CEACAM6 (NCA-90)
CLAUDIN-3
CLAUDIN-4
cMet
Collagen
Cripto
CSFR
CSFR-1
CTLA-4
CTGF
CXCL10
CXCL13
CXCR1
CXCR2
CXCR4
CYR61
DL44
DLK1
DLL4
DPP-4
DSG1
EGFR
EGFRviii
Endothelin B receptor (ETBR)
ENPP3
EpCAM
EPHA2
EPHB2
ERBB3
F protein of RSV
FAP
FGF-2
FGF8
FGFR1
FGFR2
FGFR3
FGFR4
Folate receptor
GAL3ST1
G-CSF
G-CSFR
GD2
GITR
GLUT1
GLUT4
GM-CSF
GM-CSFR
GP IIb/IIIa receptors
Gp130
GPIIB/IIIA
GPNMB
GRP78
HER2/neu
HGF
hGH
HVEM
Hyaluronidase
ICOS
IFNalpha
IFNbeta
IFNgamma
IgE
IgE Receptor (FceRI)
IGF
IGF1R
IL1B
IL1R
IL2
IL11
IL12
IL12p40
IL-12R, IL-12Rbeta1
IL13
IL13R
IL15
IL17
IL18
IL21
IL23
IL23R
IL27/IL27R (wsx1)
IL29
IL-31R
IL31/IL31R
IL2R
IL4
IL4R
IL6, IL6R
Insulin Receptor
Jagged Ligands
Jagged 1
Jagged 2
LAG-3
LIF-R
Lewis X
LIGHT
LRP4
LRRC26
MCSP
Mesothelin
MRP4
MUC1
Mucin-16 (MUC16, CA-125)
Na/K ATPase
Neutrophil elastase
NGF
Nicastrin
Notch Receptors
Notch 1
Notch 2
Notch 3
Notch 4
NOV
OSM-R
OX-40
PAR2
PDGF-AA
PDGF-BB
PDGFRalpha
PDGFRbeta
PD-1
PD-L1
PD-L2
Phosphatidyl-serine
P1GF
PSCA
PSMA
RAAG12
RAGE
SLC44A4
Sphingosine 1 Phosphate
STEAP1
STEAP2
TAG-72
TAPA1
TGFbeta
TIGIT
TIM-3
TLR2
TLR4
TLR6
TLR7
TLR8
TLR9
TMEM31
TNFalpha
TNFR
TNFRS12A
TRAIL-R1
TRAIL-R2
Transferrin
Transferrin receptor
TRK-A
TRK-B
uPAR
VAP1
VCAM-1
VEGF
VEGF-A
VEGF-B
VEGF-C
VEGF-D
VEGFR1
VEGFR2
VEGFR3
VISTA
WISP-1
WISP-2
WISP-3

[0236] As a non-limiting example, the antibody or antigen-binding fragment and/or the AB of an activatable antibody is or is derived from an antibody listed in Table 23.

TABLE 23
Exemplary sources for Abs

| Antibody Trade Name (antibody name) | Target |
|---|---|
| Avastin ™ (bevacizumab) | VEGF |
| Lucentis ™ (ranibizumab) | VEGF |
| Erbitux ™ (cetuximab) | EGFR |
| Vectibix ™ (panitumumab) | EGFR |
| Remicade ™ (infliximab) | TNFα |
| Humira ™ (adalimumab) | TNFα |
| Tysabri ™ (natalizumab) | Integrinα4 |
| Simulect ™ (basiliximab) | IL2R |
| Soliris ™ (eculizumab) | Complement C5 |
| Raptiva ™ (efalizumab) | CD11a |
| Bexxar ™ (tositumomab) | CD20 |
| Zevalin ™ (ibritumomab tiuxetan) | CD20 |
| Rituxan ™ (rituximab) | CD20 |
| (Ocrelizumab) | CD20 |
| Arzerra ™ (ofatumumab) | CD20 |
| Gazyva ™ (Obinutuzumab) | CD20 |
| Zenapax ™ (daclizumab) | CD25 |
| Adcetris ™ (brentuximab vedotin) | CD30 |
| Myelotarg ™ (gemtuzumab) | CD33 |
| Mylotarg ™ (gemtuzumab ozogamicin) | CD33 |
| Campath ™ (alemtuzumab) | CD52 |
| ReoPro ™ (abiciximab) | Glycoprotein receptor IIb/IIIa |
| Xolair ™ (omalizumab) | IgE |
| Herceptin ™ (trastuzumab) | Her2 |
| Kadcyla ™ (trastuzumab emtansine) | Her2 |
| Synagis ™ (palivizumab) | F protein of RSV |
| (ipilimumab) | CTLA-4 |
| (tremelimumab) | CTLA-4 |
| Hu5c8 | CD40L |
| (pertuzumab) | Her2-neu |
| (ertumaxomab) | CD3/Her2-neu |
| Orencia ™ (abatacept) | CTLA-4 |
| (tanezumab) | NGF |
| (bavituximab) | Phosphatidylserine |
| (zalutumumab) | EGFR |
| (mapatumumab) | EGFR |
| (matuzumab) | EGFR |
| (nimotuzumab) | EGFR |
| ICR62 | EGFR |
| mAb 528 | EGFR |
| CH806 | EGFR |
| MDX-447 | EGFR/CD64 |
| (edrecolomab) | EpCAM |
| RAV12 | RAAG12 |
| huJ591 | PSMA |
| Enbrel ™ (etanercept) | TNF-R |
| Amevive ™ (alefacept) | 1-92-LFA-3 |
| Antril ™, Kineret ™ (ankinra) | IL-1Ra |
| GC1008 | TGFbeta |
| | Notch, e.g., Notch 1 |
| | Jagged 1 or Jagged 2 |
| (adecatumumab) | EpCAM |
| (figitumumab) | IGF1R |
| (tocilizumab) | IL-6 receptor |
| Stelara ™ (ustekinumab) | IL-12/IL-23 |
| Prolia ™ (denosumab) | RANKL |

[0237] In some embodiments, the additional antibody or antigen binding fragment thereof, conjugated antibody or antigen binding fragment thereof, activatable antibody or antigen binding fragment thereof, and/or conjugated activatable antibody or antigen binding fragment thereof is a monoclonal antibody, domain antibody, single chain, Fab fragment, a F(ab′)₂ fragment, a scFv, a scAb, a dAb, a single domain heavy chain antibody, or a single domain light chain antibody. In some embodiments, the additional antibody or antigen binding fragment thereof, conjugated antibody or antigen binding fragment thereof, activatable antibody or antigen binding fragment thereof, and/or conjugated activatable antibody or antigen binding fragment thereof is a mouse, other rodent, chimeric, humanized or fully human monoclonal antibody.

[0238] The disclosure also provides methods of producing an anti-PDL1 antibody and/or activatable anti-PDL1 antibody polypeptide by culturing a cell under conditions that lead to expression of the polypeptide, wherein the cell comprises an isolated nucleic acid molecule encoding an antibody and/or an activatable antibody described herein, and/or vectors that include these isolated nucleic acid sequences. The disclosure provides methods of producing an antibody and/or activatable antibody by culturing a cell under conditions that lead to expression of the antibody and/or activatable antibody, wherein the cell comprises an isolated nucleic acid molecule encoding an antibody and/or an activatable antibody described herein, and/or vectors that include these isolated nucleic acid sequences.

[0239] The invention also provides a method of manufacturing activatable antibodies that in an activated state binds PDL1 by (a) culturing a cell comprising a nucleic acid construct that encodes the activatable antibody under conditions that lead to expression of the activatable antibody, wherein the activatable antibody comprises a masking moiety (MM), a cleavable moiety (CM), and an antibody or an antigen binding fragment thereof (AB) that specifically binds PDL1, (i) wherein the CM is a polypeptide that functions as a substrate for a protease; and (ii) wherein the CM is positioned in the activatable antibody such that, when the activatable antibody is in an uncleaved state, the MM interferes with specific binding of the AB to PDL1 and in a cleaved state the MM does not interfere or compete with specific binding of the AB to PDL1; and (b) recovering the activatable antibody. Suitable AB, MM, and/or CM include any of the AB, MM, and/or CM disclosed herein.

[0240] In some embodiments, the activatable antibody in the uncleaved state has the structural arrangement from N-terminus to C-terminus as follows: MM-CM-AB or AB-CM-MM. In some embodiments, the activatable antibody comprises a linking peptide between the MM and the CM. In some embodiments, the activatable antibody comprises a linking peptide between the CM and the AB. In some embodiments, the activatable antibody comprises a first linking peptide (LP1) and a second linking peptide (LP2), and wherein the activatable antibody in the uncleaved state has the structural arrangement from N-terminus to C-terminus as follows: MM-LP1-CM-LP2-AB or AB-LP2-CM-LP1-MM. In some embodiments, the activatable antibody in the uncleaved state has the structural arrangement from N-terminus to C-terminus as follows: spacer-MM-LP1-CM-LP2-AB or AB-LP2-CM-LP1-MM-spacer. In some embodiments, the two linking peptides need not be identical to each other.

[0241] In some embodiments, at least one of LP1 or LP2 comprises an amino acid sequence selected from the group consisting of (GS)ₙ, (GGS)ₙ, (GSGGS)ₙ (SEQ ID NO: 191) and (GGGS)ₙ (SEQ ID NO: 192), where n is an integer of at least one.

[0242] In some embodiments, at least one of LP1 or LP2 comprises an amino acid sequence selected from the group consisting of GGSG (SEQ ID NO: 193), GGSGG (SEQ ID NO: 194), GSGSG (SEQ ID NO: 195), GSGGG (SEQ ID NO: 196), GGGSG (SEQ ID NO: 197), and GSSSG (SEQ ID NO: 198).

[0243] In some embodiments, LP1 comprises the amino acid sequence GSSGGSGGSGGSG (SEQ ID NO: 199), GSSGGSGGSGG (SEQ ID NO: 200), GSSGGSGGSGGS (SEQ ID NO: 201), GSSGGSGGSGGSGGGS (SEQ ID NO: 202), GSSGGSGGSG (SEQ ID NO: 203), or GSSGGSGGSGS (SEQ ID NO: 204).

[0244] In some embodiments, LP2 comprises the amino acid sequence GSS, GGS, GGGS (SEQ ID NO: 205), GSSGT (SEQ ID NO: 206) or GSSG (SEQ ID NO: 207).

[0245] The invention provides methods of preventing, delaying the progression of, treating, alleviating a symptom of, or otherwise ameliorating an PDL1 mediated disease in a subject by administering a therapeutically effective amount of an anti-PDL1 antibody, conjugated anti-PDL1 antibody, activatable anti-PDL1 antibody and/or conjugated activatable anti-PDL1 antibody described herein to a subject in need thereof.

[0246] The invention also provides methods of preventing, delaying the progression of, treating, alleviating a symptom of, or otherwise ameliorating cancer in a subject by administering a therapeutically effective amount of an anti-PDL1 antibody, conjugated anti-PDL1 antibody, activatable anti-PDL1 antibody and/or conjugated activatable anti-PDL1 antibody described herein to a subject in need thereof. PDL1 is known to be expressed in a variety of cancers, such as, by way of non-limiting example, melanoma, non-small cell lung cancer, nasopharyngeal cancer, glioblastoma/mixed glioma, colon adenocarcinoma, hepatocellular carcinoma, urothelial cancer, multiple myeloma, ovarian cancer, gastric carcinoma, esophageal cancer, pancreatic cancer, renal cell carcinoma (RCC), breast cancer, lymphomas, and leukemias. (See e.g., Chen et al., “Molecular Pathways: Next-Generation Immunotherapy—Inhibiting Programmed Death-Ligand 1 and Programmed Death-1,” Clin. Can. Res., vol. 18: 6580-6587 (2012), the contents of which are hereby incorporated by reference in their entirety).

[0247] In some embodiments, the cancer is a bladder cancer, a bone cancer, a breast cancer, a carcinoid, a cervical cancer, a colon cancer, an endometrial cancer, a glioma, a head and neck cancer, a liver cancer, a lung cancer, a lymphoma, a melanoma, an ovarian cancer, a pancreatic cancer, a prostate cancer, a renal cancer, a sarcoma, a skin cancer, a stomach cancer, a testis cancer, a thyroid cancer, a urogenital cancer, and/or a urothelial cancer.

[0248] In some embodiments, the cancer is selected from the group consisting of melanoma (MEL), renal cell carcinoma (RCC), squamous non-small cell lung cancer (NSCLC), non-squamous NSCLC, colorectal cancer (CRC), castration-resistant prostate cancer (CRPC), hepatocellular carcinoma (HCC), squamous cell carcinoma of the head and neck, carcinomas of the esophagus, ovary, gastrointestinal tract and breast, or a hematologic malignancy such as multiple myeloma, B-cell lymphoma, T-cell lymphoma, Hodgkin's lymphoma/primary mediastinal B-cell lymphoma, and chronic myelogenous leukemia. In some embodiments, the cancer is due to a PDL1-expressing tumor.

[0249] The invention also provides methods of treating cancer patients with an autoimmune or inflammatory disease by administering a therapeutically effective amount of an anti-PDL1 antibody, conjugated anti-PDL1 antibody, activatable anti-PDL1 antibody and/or conjugated activatable anti-PDL1 antibody described herein to a subject in need thereof. In some embodiments, the autoimmune disease is colitis, RA, pancreatitis, diabetes, or pneumonitis.

[0250] An anti-PDL1 antibody, a conjugated anti-PDL1 antibody, an activatable anti-PDL1 antibody and/or a conjugated activatable anti-PDL1 antibody used in any of the embodiments of these methods and uses can be administered at any stage of the disease. For example, such an anti-PDL1 antibody, conjugated anti-PDL1 antibody, activatable anti-PDL antibody and/or conjugated activatable anti-PDL1 antibody can be administered to a patient suffering cancer of any stage, from early to metastatic. The terms subject and patient are used interchangeably herein.

[0251] In some embodiments, the subject is a mammal, such as a human, non-human primate, companion animal (e.g., cat, dog, horse), farm animal, work animal, or zoo animal. In some embodiments, the subject is a human. In some embodiments, the subject is a companion animal. In some embodiments, the subject is an animal in the care of a veterinarian.

[0252] The anti-PDL1 antibody, conjugated anti-PDL1 antibody, activatable anti-PDL1 antibody and/or conjugated activatable anti-PDL1 antibody and therapeutic formulations thereof are administered to a subject suffering from or susceptible to a disease or disorder associated with aberrant PDL1 expression and/or activity. A subject suffering from or susceptible to a disease or disorder associated with aberrant PDL1 expression and/or activity is identified using any of a variety of methods known in the art. For example, subjects suffering from cancer or other neoplastic condition are identified using any of a variety of clinical and/or laboratory tests such as, physical examination and blood, urine and/or stool analysis to evaluate health status. For example, subjects suffering from inflammation and/or an inflammatory disorder are identified using any of a variety of clinical and/or laboratory tests such as physical examination and/or bodily fluid analysis, e.g., blood, urine and/or stool analysis, to evaluate health status.

[0253] Administration of an anti-PDL1 antibody, conjugated anti-PDL1 antibody, activatable anti-PDL1 antibody and/or conjugated activatable anti-PDL1 antibody to a patient suffering from a disease or disorder associated with aberrant PDL1 expression and/or activity is considered successful if any of a variety of laboratory or clinical objectives is achieved. For example, administration of an anti-PDL1 antibody, conjugated anti-PDL1 antibody, activatable anti-PDL1 antibody and/or conjugated activatable anti-PDL1 antibody to a patient suffering from a disease or disorder associated with aberrant PDL1 expression and/or activity is considered successful if one or more of the symptoms associated with the disease or disorder is alleviated, reduced, inhibited or does not progress to a further, i.e., worse, state. Administration of an anti-PDL1 antibody, conjugated anti-PDL1 antibody, activatable anti-PDL1 antibody and/or conjugated activatable anti-PDL1 antibody to a patient suffering from a disease or disorder associated with aberrant PDL1 expression and/or activity is considered successful if the disease or disorder enters remission or does not progress to a further, i.e., worse, state.

[0254] In some embodiments, the anti-PDL1 antibody, conjugated anti-PDL1 antibody, activatable anti-PDL1 antibody and/or conjugated activatable anti-PDL1 antibody is administered before and/or during and/or after treatment in combination with one or more additional agents such as, for example, a chemotherapeutic agent, an anti-inflammatory agent, and/or an immunosuppressive agent. In some embodiments, the anti-PDL1 antibody, conjugated anti-PDL1 antibody, activatable anti-PDL1 antibody and/or conjugated activatable anti-PDL1 antibody and the additional agent(s) are administered simultaneously. For example, the anti-PDL1 antibody, conjugated anti-PDL1 antibody, activatable anti-PDL1 antibody and/or conjugated activatable anti-PDL1 antibody and the additional agent(s) can be formulated in a single composition or administered as two or more separate compositions. In some embodiments, the anti-PDL1 antibody, conjugated anti-PDL1 antibody, activatable anti-PDL1 antibody and/or conjugated activatable anti-PDL1 antibody and the additional agent(s) are administered sequentially.

[0255] The invention also provides methods and kits for using the activatable anti-PDL1 antibodies and/or conjugated activatable anti-PDL1 antibodies in a variety of diagnostic and/or prophylactic indications. For example, the invention provides methods and kits for detecting the presence or absence of a cleaving agent and a target of interest in a subject or a sample by (i) contacting a subject or sample with an anti-PDL1 activatable antibody, wherein the anti-PDL1 activatable antibody comprises a masking moiety (MM), a cleavable moiety (CM) that is cleaved by the cleaving agent, and an antigen binding domain or fragment thereof (AB) that specifically binds the target of interest, wherein the anti-PDL1 activatable antibody in an uncleaved, non-activated state comprises a structural arrangement from N-terminus to C-terminus as follows: MM-CM-AB or AB-CM-MM; (a) wherein the MM is a peptide that inhibits binding of the AB to PDL1, and wherein the MM does not have an amino acid sequence of a naturally occurring binding partner of the AB and is not a modified form of a natural binding partner of the AB; and (b) wherein, when the AB is in an uncleaved, non-activated state, the MM interferes with specific binding of the AB to PDL1, and when the AB is in a cleaved, activated state the MM does not interfere or compete with specific binding of the AB to PDL1; and (ii) measuring a level of activated anti-PDL1 activatable antibody in the subject or sample, wherein a detectable level of activated anti-PDL1 activatable antibody in the subject or sample indicates that the cleaving agent and PDL1 are present in the subject or sample and wherein no detectable level of activated anti-PDL1 activatable antibody in the subject or sample indicates that the cleaving agent, PDL1 or both the cleaving agent and PDL1 are absent in the subject or sample.

[0256] In some embodiments, the activatable anti-PDL1 antibody is an activatable anti-PDL1 antibody to which a therapeutic agent is conjugated. In some embodiments, the activatable anti-PDL1 antibody is not conjugated to an agent. In some embodiments, the activatable anti-PDL1 antibody comprises a detectable label. In some embodiments, the detectable label is positioned on the AB. In some embodiments, measuring the level of activatable anti-PDL1 antibody in the subject or sample is accomplished using a secondary reagent that specifically binds to the activated antibody, wherein the reagent comprises a detectable label. In some embodiments, the secondary reagent is an antibody comprising a detectable label.

[0257] In some embodiments of these methods and kits, the activatable anti-PDL1 antibody includes a detectable label. In some embodiments of these methods and kits, the detectable label includes an imaging agent, a contrasting agent, an enzyme, a fluorescent label, a chromophore, a dye, one or more metal ions, or a ligand-based label. In some embodiments of these methods and kits, the imaging agent comprises a radioisotope. In some embodiments of these methods and kits, the radioisotope is indium or technetium. In some embodiments of these methods and kits, the contrasting agent comprises iodine, gadolinium or iron oxide. In some embodiments of these methods and kits, the enzyme comprises horseradish peroxidase, alkaline phosphatase, or β-galactosidase. In some embodiments of these methods and kits, the fluorescent label comprises yellow fluorescent protein (YFP), cyan fluorescent protein (CFP), green fluorescent protein (GFP), modified red fluorescent protein (mRFP), red fluorescent protein tdimer2 (RFP tdimer2), HCRED, or a europium derivative. In some embodiments of these methods and kits, the luminescent label comprises an N-methylacrydium derivative. In some embodiments of these methods, the label comprises an Alexa Fluor® label, such as Alex Fluor® 680 or Alexa Fluor® 750. In some embodiments of these methods and kits, the ligand-based label comprises biotin, avidin, streptavidin or one or more haptens.

[0258] In some embodiments of these methods and kits, the subject is a mammal. In some embodiments of these methods, the subject is a human. In some embodiments, the subject is a non-human mammal, such as a non-human primate, companion animal (e.g., cat, dog, horse), farm animal, work animal, or zoo animal. In some embodiments, the subject is a rodent.

[0259] In some embodiments of these methods and kits, the method is an in vivo method. In some embodiments of these methods, the method is an in situ method. In some embodiments of these methods, the method is an ex vivo method. In some embodiments of these methods, the method is an in vitro method.

[0260] In some embodiments of the methods and kits, the method is used to identify or otherwise refine a patient population suitable for treatment with an anti-PDL1 activatable antibody of the disclosure, followed by treatment by administering that activatable anti-PDL1 antibody and/or conjugated activatable anti-PDL1 antibody to a subject in need thereof. For example, patients that test positive for both the target (e.g., PDL1) and a protease that cleaves the substrate in the cleavable moiety (CM) of the anti-PDL1 activatable antibody being tested in these methods are identified as suitable candidates for treatment with such an anti-PDL1 activatable antibody comprising such a CM, and the patient is then administered a therapeutically effective amount of the activatable anti-PDL1 antibody and/or conjugated activatable anti-PDL1 antibody that was tested. Likewise, patients that test negative for either or both of the target (e.g., PDL1) and the protease that cleaves the substrate in the CM in the activatable antibody being tested using these methods might be identified as suitable candidates for another form of therapy. In some embodiments, such patients can be tested with other anti-PDL1 activatable antibodies until a suitable anti-PDL1 activatable antibody for treatment is identified (e.g., an anti-PDL1 activatable antibody comprising a CM that is cleaved by the patient at the site of disease). In some embodiments, the patient is then administered a therapeutically effective amount of the activatable anti-PDL1 antibody and/or conjugated for which the patient tested positive. Suitable AB, MM, and/or CM include any of the AB, MM, and/or CM disclosed herein.

[0261] Pharmaceutical compositions according to the invention can include an antibody of the invention and a carrier. These pharmaceutical compositions can be included in kits, such as, for example, diagnostic kits.

### BRIEF DESCRIPTION OF THE DRAWINGS

[0262] FIG. 1A is graph depicting by ELISA-based binding that PDL1 c60 ScFv-phage binds specifically to human and mouse PDL1.

[0263] FIG. 2A is a graph depicting that hPD1 inhibits the binding of clones 12, 18 and 60 to hPDL1 in an ELISA format, and, furthermore mPD1 inhibits the binding of clone 60 to mPDL1.

[0264] FIG. 3A is a graph depicting saturation binding data and demonstrates that anti-PDL1 clone 60:IgG binds to human PDL1 with a binding affinity˜1 nM, and to mouse PDL1 at 30 nM.

[0265] FIGS. 4A and 4B are a series of graphs depicting H2 specificity and cross reactivity (FIG. 4A) and H3W specificity and cross reactivity (FIG. 4B).

[0266] FIGS. 5A and 5B are a series of graphs depicting that combining the matured heavy variable CDR3 domains with the heavy variable CDR2 domains results in antibodies with enhanced affinity towards human PDL1.

[0267] FIGS. 6A, 6B, 6C, and 6D are a series of graphs depicting that anti-PDL1 antibody C5H9 binds to human and mouse PDL1 with near equal affinity and that anti-PDL1 antibodies C5B10 and C5E10 only bind human PDL1.

[0268] FIG. 7A is a graph depicting the ability of anti-PDL1 antibody C5H9 to bind with high and equal affinity to human, mouse and cyno PDL1.

[0269] FIGS. 8A and 8B are a series of graphs depicting that anti-PDL1 antibody C5H9v2 has lower immunogenicity potential and enhanced manufacturability. These graphs demonstrate decreased predicted immunogenicity, increased expression levels (3×), and increased monomer percentage in human IgG1 format.

[0270] FIGS. 9A, 9B, and 9C are a series of graphs depicting ability of anti-PDL1 antibody C5H9v2 to bind with high affinity to (A) mouse, (B) cyno, and (C) human PDL1. FIGS. 9A-9C show that both anti-PDL1 antibodies C5H9 and C5H9v2 bind human, mouse and cyno PDL1 with near equal affinities.

[0271] FIG. 10A is a graph depicting C5H9v2 specificity for a panel of human and mouse proteins. FIG. 10A demonstrates that anti-PDL1 antibody C5H9v2 binds only to human and mouse PDL1 demonstrating specificity toward PDL1.

[0272] FIG. 11A is a series of graphs depicting B7-1 and PD1 blockade. FIG. 11 demonstrates that both anti-PDL1 antibody C5H9 and anti-PDL1 antibody C5H9v2 are potent blockers of either B7-1 or PD1 binding to PDL1, and that blockade includes all three species human, cyno and mouse with single digit nM EC₅₀'s.

[0273] FIG. 12A is a graph depicting that anti-PDL1 antibody C5H9 accelerates the onset of diabetes in NOD mice similar to the positive control anti-PDL1 antibody 10F9G2.

[0274] FIG. 13A is a graph depicting that anti-PDL1 antibody C5H9v2 accelerates the onset of diabetes in NOD mice in a dose dependent matter.

[0275] FIG. 14A is a graph depicting that an anti-PDL1 antibody C5H9v2 inhibits the growth of MC38 syngeneic tumors similar to positive control anti-PDL1 antibody 10F9G2.

[0276] FIGS. 15A and B are a series of graphs depicting binding isotherms for anti-PDL1 activatable antibodies that include the anti-PDL1 antibody C5H9v2.

[0277] FIG. 16A is a graph depicting binding isotherms for anti-PDL1 activatable antibodies that include the anti-PDL1 antibody C5H9v2.

[0278] FIG. 17A is a graph depicting binding isotherms for anti-PDL1 activatable antibodies that include the anti-PDL1 antibody C5H9v2.

[0279] FIGS. 18A and 18B are a series of graphs depicting that anti-PDL1 activatable antibody PL15-0003-C5H9v2, when administered at a dose of 1 mg/kg, has an absence of diabetes induction and anti-PDL1 activatable antibody PL18-0003-C5H9v2, when administered at a dose of 1 mg/kg, has a delay in diabetes induction compared to the anti-PDL1 antibody C5H9v2 administered at a dose of 1 mg/kg in NOD mice (FIG. 18A); in addition, anti-PDL1 activatable antibody PL15-0003-C5H9v2, when administered at a dose of 3 mg/kg induced diabetes in 2 of 8 NOD mice (75% non-diabetic), compared to 1 mg/kg anti-PDL1 antibody C5H9v2 which led to 38% non-diabetic NOD mice (FIG. 18B).

[0280] FIG. 19A is a graph depicting that anti-PDL1 activatable antibodies PL15-0003-C5H9v2 and PL18-0003-C5H9v2 inhibit the growth of MC38 syngeneic tumors similar to anti-PDL1 antibody C5H9v2.

[0281] FIGS. 20A, 20B, 20C, and 20D are a series of graphs depicting the percent of anti-PDL1 antibody C5H9v2 and anti-PDL1 activatable antibody PL15-0003-C5H9v2 bound to CD4+ and CD8+ T cells from peripheral blood (FIGS. 20A, 20B) or spleen (FIGS. 20C, 20D). In all graphs, the circle represents isotype, the square represents anti-PDL1 antibody C5H9v2, and the triangle represents anti-PDL1 activatable antibody PL15-0003-C5H9v2.

[0282] FIGS. 21A and 21B are a series of graphs depicting that the presence of tumor-derived proteases capable of cleaving anti-PDL1 activatable antibody PL15-0003-C5H9v2 (depicted by squares) did not lead to high levels of activated activatable antibody in the blood compared to anti-PDL1 antibody C5H9v2 (depicted by circles) or an isotype antibody (depicted by triangles) (FIG. 21A) despite the plasma concentrations of the activatable antibody being higher than those of the antibody (FIG. 21B).

[0283] FIG. 22A is a graph depicting the ability of anti-PDL1 activatable antibody PL07-2001-C5H9v2 to increase CMV-stimulated IFN-gamma secretion as compared to control hIgG4, but with decreased potency relative to anti-PDL1 parental antibody C5H9v2.

[0284] FIGS. 23A, 23B, 23C, and 23D are a series of images showing the ability of anti-PDL1 activatable antibody PL15-0003-C5H9v2 to be activated and to bind frozen MC38 mouse cancer tissues using an in situ imaging method.

[0285] FIG. 24A depicts that anti-PDL1 activatable antibody PL15-0003-C5H9v2 exhibited a higher EC₅₀ for PDL1 binding and PD1 blocking than did the anti-PDL1 antibody as measured by ELISA. The figure further demonstrates that activation of anti-PDL1 activatable antibody PL15-0003-C5H9v2 by matriptase fully restored PDL1 binding and PD1 blocking activities to levels comparable to those of anti-PDL1 antibody C5H9v2.

[0286] FIGS. 25A and 25B are a series of graphs depicting the ability of anti-PDL1 activatable antibodies referred to herein as PL07-2001-C5H9v2 and PF07-3001-C5H9v2 and of the anti-PDL1 antibody referred to herein as C5H9 to bind to human or murine PDL1.

[0287] FIGS. 26A, 26B, and 26C are a series of graphs depicting the abilities of anti-PDL1 activatable antibody PL07-2001-C5H9v2, uPA-activated anti-PDL1 activatable antibody PL07-2001-C5H9v2, MMP14-activated anti-PDL1 activatable antibody PL07-2001-C5H9v2, and anti-PDL1 antibody C5H9v2 to block human PD1 (PD-1) to human PDL1 (FIG. 26A), cynomolgus PD1 (PD-1) binding to cynomolgus PDL1 (FIG. 26B), or rat PD1 (PD-1) binding to rat PDL1 (FIG. 26C).

[0288] FIGS. 27A and 27B are a series of graphs depicting the ability of anti-PDL1 activatable antibody PL07-2001-C5H9v2, uPA-activated anti-PDL1 activatable antibody PL07-2001-C5H9v2, MMP14-activated anti-PDL1 activatable antibody PL07-2001-C5H9v2, or anti-PDL1 antibody C5H9v2 to human B7-1 binding to human PDL1 (FIG. 27A) or cynomolgus B7-1 binding to cynomolgus PDL1 (FIG. 27B).

[0289] FIG. 28A is a graph depicting the ability of the anti-PDL1 activatable antibodies PL15-0003-C5H9v2, PL15-2001-C5H9v2, and PL15-3001-C5H9v2 to inhibit the growth of MC38 syngeneic tumors similar to positive control anti-PDL1 antibody C5H9v2.

[0290] FIGS. 29A, 29B, and 29C are a series of graphs depicting that the presence of tumor-derived proteases capable of cleaving the activatable antibodies anti-PDL1 antibody C5H9v2 or anti-PDL1 activatable antibody PL15-0003-C5H9v2, PL15-2001-C5H9v2, or PL15-3001-C5H9v2 did not lead to high levels of activated activatable antibodies in the blood.

[0291] FIG. 30A is an illustration depicting the ability of proteases in a tumor implanted into a mouse to activate the anti-PDL1 activatable antibody PL07-2001-C5H9v2.

### DETAILED DESCRIPTION OF THE INVENTION

[0292] The present invention provides monoclonal antibodies (mAbs) and activatable monoclonal antibodies that specifically bind human programmed death ligand 1 (PDL1). PDL1 is a 40 kDa type I transmembrane protein that forms a complex with its receptor programmed cell death protein 1 (PD1), also known as CD279. Engagement of PDL1 with its receptor PD1 on T cells delivers a signal that inhibits TCR-mediated activation of IL-2 production and T cell proliferation. Aberrant expression and/or activity of PDL1 and PDL1-related signaling has been implicated in the pathogenesis of many diseases and disorders, such as cancer, inflammation, and autoimmunity.

[0293] The activatable anti-PDL1 antibodies are used in methods of treating, preventing, delaying the progression of, ameliorating and/or alleviating a symptom of a disease or disorder associated with aberrant PDL1 expression and/or activity. For example, the activatable anti-PDL1 antibodies are used in methods of treating, preventing, delaying the progression of, ameliorating and/or alleviating a symptom of a cancer or other neoplastic condition.

[0294] The activatable anti-PDL1 antibodies include an antibody or antigen-binding fragment thereof that specifically binds PDL1 coupled to a masking moiety (MM), such that coupling of the MM reduces the ability of the antibody or antigen-binding fragment thereof to bind PDL1. In some embodiments, the MM is coupled via a sequence that includes a substrate for a protease, for example, a protease that is co-localized with PDL1 at a treatment site in a subject.

[0295] Exemplary activatable anti-PDL1 antibodies of the invention include, for example, activatable antibodies that include a heavy chain and a light chain that are, or are derived from, antibodies described in the Examples, for example in Example 3 and Example 4.

[0296] In some embodiments, the activatable anti-PDL1 antibody includes a heavy chain that comprises or is derived from an amino acid sequence selected from the group consisting of SEQ ID NO: 14, 16, 18, 20, 22, 24, 26, 28, 30, 32, 34, 36, 38, 40, 42, 44, 46, 48, 50, 52, 54, and 56, and a light chain that comprises or is derived from the amino acid sequence of SEQ ID NO: 12 or SEQ ID NO: 58.

[0297] In some embodiments, the activatable anti-PDL1 antibody comprises a combination of a variable heavy chain complementarity determining region 1 (VH CDR1, also referred to herein as CDRH1) sequence, a variable heavy chain complementarity determining region 2 (VH CDR2, also referred to herein as CDRH2) sequence, a variable heavy chain complementarity determining region 3 (VH CDR3, also referred to herein as CDRH3) sequence, a variable light chain complementarity determining region 1 (VL CDR1, also referred to herein as CDRL1) sequence, a variable light chain complementarity determining region 2 (VL CDR2, also referred to herein as CDRL2) sequence, and a variable light chain complementarity determining region 3 (VL CDR3, also referred to herein as CDRL3) sequence, wherein at least one CDR sequence is selected from the group consisting of a VH CDR1 sequence shown in Table 15; a VH CDR2 sequence shown in Table 15; a VH CDR3 sequence shown in Table 15; a VL CDR1 sequence shown in Table 15; a VL CDR2 sequence shown in Table 15; and a VL CDR3 sequence shown in Table 15.

[0298] In some embodiments, the activatable antibody comprises a combination of a VH CDR1 sequence, a VH CDR2 sequence, a VH CDR3 sequence, a VL CDR1 sequence, a VL CDR2 sequence, and a VL CDR3 sequence, wherein the combination is a combination of the six CDR sequences (VH CDR1, VH CDR2, VH CDR3, VL CDR1, VL CDR2, and VL CDR3) shown in a single row in Table 15.

[0299] In some embodiments, the antibody comprises a heavy chain that comprise a combination of a VH CDR1 sequence, a VH CDR2 sequence, and a VH CDR3 sequence, wherein the combination is a combination of the three heavy chain CDR sequences (VH CDR1, VH CDR2, VH CDR3) shown in a single row in Table 15.

[0300] In some embodiments, the antibody comprises a light chain that comprise a combination of a VL CDR1 sequence, a VL CDR2 sequence, and a VL CDR3 sequence, wherein the combination is a combination of the three light chain CDR sequences (VL CDR1, VL CDR2, VL CDR3) shown in a single row in Table 15.

[0301] In some embodiments, the activatable anti-PDL1 antibody includes a heavy chain that comprises or is derived from a heavy chain amino acid sequence shown in Table 15. In some embodiments, the activatable anti-PDL1 antibody includes a light chain that comprises or is derived from a light chain amino acid sequence shown in Table 15. In some embodiments, the activatable anti-PDL1 antibody includes a heavy chain that comprises or is derived from a heavy chain amino acid sequence shown in Table 15, and a light chain that comprises or is derived from a light chain amino acid sequence shown in Table 15. In some embodiments, the activatable anti-PDL1 antibody includes a combination of heavy chain variable region and light chain variable region sequences from the combinations shown in Group A in Table 15. In some embodiments, the activatable anti-PDL1 antibody includes the combination of heavy chain variable region and light chain variable region sequences shown in Group B in Table 15. In some embodiments, the activatable anti-PDL1 antibody includes the combination of heavy chain variable region and light chain variable region sequences shown in Group C in Table 15. In some embodiments, the activatable anti-PDL1 antibody includes the combination of heavy chain variable region and light chain variable region sequences shown in Group D in Table 15. In some embodiments, the activatable anti-PDL1 antibody includes the combination of heavy chain variable region and light chain variable region sequences shown in Group E in Table 15. In some embodiments, the activatable anti-PDL1 antibody includes the combination of heavy chain variable region and light chain variable region sequences shown in Group F in Table 15. In some embodiments, the activatable anti-PDL1 antibody includes the combination of heavy chain variable region and light chain variable region sequences shown in Group G in Table 15. In some embodiments, the activatable anti-PDL1 antibody includes the combination of heavy chain variable region and light chain variable region sequences shown in Group H in Table 15. In some embodiments, the activatable anti-PDL1 antibody includes the combination of heavy chain variable region and light chain variable region sequences shown in Group I in Table 15. In some embodiments, the activatable anti-PDL1 antibody includes the combination of heavy chain and light chain sequences shown in Group J in Table 15. In some embodiments, the activatable anti-PDL1 antibody includes the combination of heavy chain variable region and light chain variable region sequences shown in Group K in Table 15. In some embodiments, the activatable anti-PDL1 antibody includes the combination of heavy chain and light chain sequences shown in Group K in Table 15. In some embodiments, the activatable anti-PDL1 antibody includes the combination of heavy chain variable region and light chain variable region sequences shown in Group L in Table 15. In some embodiments, the activatable anti-PDL1 antibody includes the combination of heavy chain variable region and light chain variable region sequences shown in Group M in Table 15. In some embodiments, the activatable anti-PDL1 antibody includes the combination of heavy chain variable region and light chain variable region sequences shown in Group N in Table 15. In some embodiments, the activatable anti-PDL1 antibody includes the combination of heavy chain variable region and light chain variable region sequences shown in Group O in Table 15.

TABLE 15
Variable Heavy Chain Region (VH) and Variable Light Chain Region (VL)
Sequences for Activatable Antibodies that Bind PDL1 (CDR sequences are
underlined; CDR sequences disclosed herein were identified in accordance with
the definitions of Kabat, Sequences of Proteins of Immunological Interest
(National Institutes of Health, Bethesda, Md. (1987 and 1991)))
Group A

| | |
|---|---|
| VH | QVQLVQSGAEVKKPGASVKVSCKASGYTFTDYGFSWVRQAPGQGLEWMGWITAYNGNTNYAQKLQGRVTMTT |
| | DTSTSTVYMELRSLRSDDTAVYYCARDYFYGMDVWGQGTTVTVSS (SEQ ID NO: 248) |
| VH | QVQLVQSGAEVKKPGSSVKVSCKTSGDTFSTYAISWVRQAPGQGLEWMGGIIPIFGKAHYAQKFQGRVTITA |
| | DESTSTAYMELSSLRSEDTAVYFCARKFHFVSGSPFGMDVWGQGTTVTVSS (SEQ ID NO: 249) |
| VH | QVQLVQSGAEVKKPGASVKVSCKASGYTFTSYDVHWVRQAPGQRLEWMGWLHADTGITKFSQKFQGRVTITR |
| | DTSASTAYMELSSLRSEDTAVYYCARERIQLWFDYWGQGT (SEQ ID NO: 250) |
| VH | QVQLVQSGAEVKKPGSSVKVSCKVSGGIFSTYAINWVRQAPGQGLEWMGGIIPIFGTANHAQKFQGRVTITA |
| | DESTSTAYMELSSLRSEDTAVYYCARDQGIAAALFDYWGQGTLVTVSS (SEQ ID NO: 251) |
| VH | EVQLVESGGGLVQPGRSLRLSCAVSGFTFDDYVVHWVRQAPGKGLEWVSGNSGNIGYADSVKGRFTISRDNA |
| | KNSLYLQMNSLRAEDTALYYCAVPFDYWGQGTLVTVSS (SEQ ID NO: 252) |
| VH | QVQLVQSGAEVKKPGSSVKVSCKTSGDTFSSYAISWVRQAPGQGLEWMGGIIPIFGRAHYAQKFQGRVTITA |
| | DESTSTAYMELSSLRSEDTAVYFCARKFHFVSGSPFGMDVWGQGTTVTVSS (SEQ ID NO: 253) |
| VH | QVQLVQSGAEVKKPGSSVKVSCKTSGGTFSSYAISWVRQAPGQGLEWMGGIIPIFGKAHYAQKFQGRVTITA |
| | DESTTTAYMELSSLRSEDTAVYYCARKYDYVSGSPFGMDVWGQGTTVTVSS (SEQ ID NO: 254) |
| VH | QVQLVQSGAEVKKPGSSVKVSCKASGGTFSSYAINWVRQAPGQGLEWMGGIIPIFGSANYAQKFQDRVTITA |
| | DESTSAAYMELSSLRSEDTAVYYCARDSSGWSRYYMDVWGQGTTVTVSS (SEQ ID NO: 255) |
| VH | QVQLVQSGAEVKEPGSSVKVSCKASGGTFNSYAISWVRQAPGQGLEWMGGIIPLFGIAHYAQKFQGRVTITA |
| | DESTNTAYMDLSSLRSEDTAVYYCARKYSYSGSPFGMDVWGQGTTVTVSS (SEQ ID NO: 256) |
| VH | EVQLVESGGGLVQPGRSLRLSCARSGITFDDYGMHWVRQAPGKGLEWVSGISWNRGRIEYADSVKGRFTISR |
| | DNAKNSLYLQMNSLRAEDTALYYCAKGRFRYFDWFLDYWGQGTLVTVSS (SEQ ID NO: 257) |
| VH | QMQLVQSGGGLVQPGGSLRLSCAASGFTFSSYWMSWVRQAPGKGLEWVANIKQDGSEKYYVDSVKGRFTISR |
| | DNAKNSLYLQMNSLRAEDTAVYYCARDYFWSGESAFDIWGKGTLVTVS (SEQ ID NO: 449) |
| VL | EIVLTQSPATLSLSPGERATLSCRASQSVSSYLVWYQQKPGQAPRLLIYDASNRATGIPARFSGSGSGTDFT |
| | LTISSLEPEDFAVYYCQQRSNWPRTFGQGTKVEIK (SEQ ID NO: 258) |
| VL | EIVLTQSPATLSLSPGERATLSCRASQSVSSYLAWYQQKPGQAPRLLIYDASNRATGIPARFSGSGSGTDFT |
| | LTISSLEPEDFAVYYCQQRSNWPTFGQGTKVEIK (SEQ ID NO: 259) |
| VL | DIQMTQSDSSLSASVGDRVTITCRASQGISSWLAWYQQKPEKAPKSLIYAASSLQSGVPSRFSGSGSGTDFT |
| | LTISSLQPEDFATYYCQQYNSYPYTFGQGTKLEIK (SEQ ID NO: 260) |
| VL | EIVLTQSPGTLSLSPGERATLSCRASQSVSSSYLAWYQQKPGQAPRLLIYGASSRATGIPDRFSGSGSGTDF |
| | TLTISRLEPEDFAVYYCQQYGSSPWTFGQGTKVEIK (SEQ ID NO: 261) |
| VL | EIVLTQSPGTLSLSPGERATLSCRASQSVSSSYLAWYQQKPGQAPRLLIYGASSRATGIPDRFSGSGSGTDF |
| | TLTISRLEPEDFAVYYCQQYGSSPFGGGTKVEIK (SEQ ID NO: 262) |
| VL | EIVLTQSPATLSLSPGERATLSCRASQSVSSYLAWYQQKPGQAPRLLIYDASNRATGIPARFSGSGSGTDFT |
| | LTISSLEPEDFAVYYCQQRSNWPTFGQGTRLEIK (SEQ ID NO: 263) |
| VL | AIQLTQSESSLSASVGDRVTITCRASQGISSALAWYQQKPGKAPKLLIYDASSLESGVPSRFSGSGSGTDFT |
| | LTISSLQPEDFATYYCQQFNSYPFTFGPGTKVDIK (SEQ ID NO: 264) |
| | DIVMTQSPSTLSASVGDRVTITCRASQGISSWLAWYQQKPGRAPKVLIYKASTLESGVPSRFSGSGSGTDFT |
| | LTISSLQPEDFATYYCQQSYSTPWTFGQGTKLEIK (SEQ ID NO: 450) |

Group B

| | |
|---|---|
| VH | EVQLVESGGGLVQPGGSLRLSCAASGFTFSRYWMSWVRQAPGKGLEWVANIKQDGSEKYYVDSVKGRFTISR |
| | DNAKNSLYLQMNSLRAEDTAVYYCAREGGWFGELAFDYWGQGTLVTVSS (SEQ ID NO: 265) |
| VL | EIVLTQSPGTLSLSDGERATLSCRASQRVSSSYLAWYQQKPGQAPRLLIYDASSRATGIPDRFSGSGSGTDF |
| | TLTISRLEPEDFAVYYCQQYGSLPWTFGQGTKVEIK (SEQ ID NO: 266) |

Group C

| | |
|---|---|
| VH | EVQLVESGGGLVQPGGSLRLSCAASGFTFSDSWIHWVRQAPGKGLEWVAWISPYGGSTYYADSVKGRFTISA |
| | DTSKNTAYLQMNSLRAEDTAVYYCARRHWPGGFDYWGQGTLVTVSA (SEQ ID NO: 267) |
| VH | EVQLVESGGGLVQPGGSLRLSCAASGFTFSGSWIHWVRQAPGKGLEWVAWILPYGGSSYYADSVKGRFTISA |
| | DTSKNTAYLQMNSLRAEDTAVYYCARRHWPGGFDYWGQGTLVTVSA (SEQ ID NO: 451) |
| VL | DIQMTQSPSSLSASVGDRVTITCRASQDVSTAVAWYQQKPGKAPKLLIYSASFLYSGVPSRFSGSGSGTDFT |
| | LTISSLQPEDFATYYCQQYLYHPATFGQGTKVEIKR (SEQ ID NO: 268) |
| VL | DIQMTQSPSSLSASVGDRVTITCRASQDVSTAVAWYQQKPGKAPKLLIYSASFLYSGVPSRFSGSGSGTDFT |
| | LTISSLQPEDFATYYCQQYYNVPWTFGQGTKVEIKR (SEQ ID NO: 452) |
| VL | DIQMTQSPSSLSASVGDRVTITCRASQDVSTAVAWYQQKPGKAPKLLIYSASFLYSGVPSRFSGSGSGTDFT |
| | LTISSLQPEDFATYYCQQYYAPPWTFGQGTKVEIKR (SEQ ID NO: 453) |
| VL | DIQMTQSPSSLSASVGDRVTITCRASQDVSTAVAWYQQKPGKAPKLLIYSASFLYSGVPSRFSGSGSGTDFT |
| | LTISSLQPEDFATYYCQQYYTVPWTFGQGTKVEIKR (SEQ ID NO: 454) |
| VL | DIQMTQSPSSLSASVGDRVTITCRASQVINTFLAWYQQKPGKAPKLLIYSASTLASGVPSRFSGSGSGTDFT |
| | LTISSLQPEDFATYYCQQYYTVPRTFGQGTKVEIKR (SEQ ID NO: 455) |
| VL | DIQMTQSPSSLSASVGDRVTITCRASQDVSTAVAWYQQKPGKAPKLLIYSASFLYSGVPSRFSGSGSGTDFT |
| | LTISSLQPEDFATYYCQQGYGVPRTFGQGTKVEIKR (SEQ ID NO: 456) |
| VL | DIQMTQSPSSLSASVGDRVTITCRASQDVSTAVAWYQQKPGKAPKLLIYSASFLYSGVPSRFSGSGSGTDFT |
| | LTISSLQPEDFATYYCQQYLFTPPTFGQGTKVEIKR (SEQ ID NO: 457) |
| VL | DIQMTQSPSSLSASVGDRVTITCRASQDVSTAVAWYQQKPGKAPKLLIYSASFLYSGVPSRFSGSGSGTDFT |
| | LTISSLQPEDFATYYCQQYFITPTTFGQGTKVEIKR (SEQ ID NO: 458) |
| VL | DIQMTQSPSSLSASVGDRVTITCRASQDVSTAVAWYQQKPGKAPKLLIYSASFLYSGVPSRFSGSGSGTDFT |
| | LTISSLQPEDFATYYCQQYYYTPPTFGQGTKVEIKR (SEQ ID NO: 459) |
| VL | DIQMTQSPSSLSASVGDRVTITCRASQDVSTAVAWYQQKPGKAPKLLIYSASFLYSGVPSRFSGSGSGTDFT |
| | LTISSLQPEDFATYYCQQFFYTPPTFGQGTKVEIKR (SEQ ID NO: 460) |
| VL | DIQMTQSPSSLSASVGDRVTITCRASQDVSTAVAWYQQKPGKAPKLLIYSASFLYSGVPSRFSGSGSGTDFT |
| | LTISSLQPEDFATYYCQQSLFTPPTFGQGTKVEIKR (SEQ ID NO: 461) |
| VL | DIQMTQSPSSLSASVGDRVTITCRASQDVSTAVAWYQQKPGKAPKLLIYSASFLYSGVPSRFSGSGSGTDFT |
| | LTISSLQPEDFATYYCQQSLYTPPTFGQGTKVEIKR (SEQ ID NO: 462) |
| VL | DIQMTQSPSSLSASVGDRVTITCRASQDVSTAVAWYQQKPGKAPKLLIYSASFLYSGVPSRFSGSGSGTDFT |
| | LTISSLQPEDFATYYCQQSWYHPPTFGQGTKVEIKR (SEQ ID NO: 463) |
| VL | DIQMTQSPSSLSASVGDRVTITCRASQDVSTAVAWYQQKPGKAPKLLIYSRSFLYSGVPSRFSGSGSGTDFT |
| | LTISSLQPEDFATYYCQQYFYIPPTFGQGTKVEIKR (SEQ ID NO: 464) |
| VL | DIQMTQSPSSLSASVGDRVTITCRASQDVSTAVAWYQQKPGKAPKLLIYSASFLYSGVPSRFSGSGSGTDFT |
| | LTISSLQPEDFATYYCQQYWYTPTTFGQGTKVEIKR (SEQ ID NO: 465) |
| VL | DIQMTQSPSSLSASVGDRVTITCRASQDVSTAVAWYQQKPGKAPKLLIYSASFLYSGVPSRFSGSGSGTDFT |
| | LTISSLQPEDFATYYCQQSYFIPPTFGQGTKVEIKR (SEQ ID NO: 466) |

Group D

| | |
|---|---|
| VH | METGLRWLLLVAVLKGVQCLSVEESGGRLVTPGTPLTLTCTASGFTITNYHMFWVRQAPGKGLEWIGVITSS |
| | GIGSSSTTYYATWAKGRFTISKTSTTVNLRITSPTTEDTATYFCARDYFTNTYYALDIWGPGTLVTVSS |
| | (SEQ ID NO: 467) |
| VH | QVQLVQSGAEVKKPGSSVKVSCKTSGDTFSTYAISWVRQAPGQGLEWMGGIIPIFGKAHYAQKFQGRVTITA |
| | DESTSTAYMELSSLRSEDTAVFCARKFHFVSGSPFGMDVWGQGTTVTVSS (SEQ ID NO: 249) |
| VH | QVQLVQSGAEVKKPGASVKVSCKASGYTFTSYDVHWVRQAPGQRLEWMGWLHADTGITKFSQKFQGRVTITR |
| | DTSASTAYMELSSLRSEDTAVYYCARERIQLWFDYWGQGTLVTVSS (SEQ ID NO: 468) |
| VH | QVQLVQSGAEVKKPGSSVKVSCKVSGGIFSTYAINWVRQAPGQGLEWMGGIIPIFGTANHAQKFQGRVTITA |
| | DESTSTAYMELSSLRSEDTAVYYCARDQGIAAALFDYWGQGTLVTVSS (SEQ ID NO: 251) |
| VH | EVQLVESGGGLVQPGRSLRLSCAVSGFTFDDYVVHWVRQAPGKGLEWVSGISGNSGNIGYADSVKGRFTISR |
| | DNAKNSLYLQMNSLRAEDTALYYCAVPFDYWGQGTLVTVSS (SEQ ID NO: 469) |
| VH | QVQLVQSGAEVKKPGSSVKVSCKTSGDTFSSYAISWVRQAPGQGLEWMGGIIPIFGRAHYAQKFQGRVTITA |
| | DESTSTAYMELSSLRSEDTAVYFCARKFHFVSGSPFGMDVWGQGTTVTVSS (SEQ ID NO: 253) |
| VH | QVQLVQSGAEVKKPGSSVKVSCKTSGGTFSSYAISWVRQAPGQGLEWMGGIIPIFGKAHYAQKFQGRVTITA |
| | DESTTTAYMELSSLRSEDTAVYYCARKYDYVSGSPFGMDVWGQGTTVTVSS (SEQ ID NO: 254) |
| VH | QVQLVQSGAEVKKPGSSVKVSCKASGGTFSSYAINWVRQAPGQGLEWMGGIIPIFGSANYAQKFQDRVTITA |
| | DESTSAAYMELSSLRSEDTAVYYCARDSSGWSRYYMDVWGQGTTVTVSS (SEQ ID NO: 255) |
| VH | QVQLVQSGAEVKEPGSSVKVSCKASGGTFNSYAISWVRQAPGQGLEWMGGIIPLFGIAHYAQKFQGRVTITA |
| | DESTNTAYMDLSSLRSEDTAVYYCARKYSYVSGSPFGMDVWGQGTTVTVSS (SEQ ID NO: 256) |
| VH | EVQLVESGGGLVQPGRSLRLSCAASGITFDDYGMHWVRQAPGKGLEWVSGISWNRGRIEYADSVKGRFTISR |
| | DNAKNSLYLQMNSLRAEDTALYYCAKGRFRYFDWFLDYWGQGTLVTVSS (SEQ ID NO: 257) |
| VL | MDTRAPTQLLGLLLLWLPGARCALVMTQTPSSTSTAVGGTVTIKCQASQSISVYLAWYQQKPGQPPKLLIYS |
| | ASTLASGVPSRFKGSRSGTEYTLTISGVQREDAATYYCLGSAGS (SEQ ID NO: 470) |
| VL | EIVLTQSPATLSLSPGERATLSCRASQSVSSYLVWYQQKPGQAPRLLIYDASNRATGIPARFSGSGSGTDFT |
| | LTISSLEPEDFAVYYCQQRSNWPRTFGQGTKVEIK (SEQ ID NO: 258) |
| VL | EIVLTQSPATLSLSPGERATLSCRASQSVSSYLAWYQQKPGQAPRLLIYDASNRATGIPARFSGSGSGTDFT |
| | LTISSLEPEDFAVYYCQQRSNWPTFGQGTKVEIK (SEQ ID NO: 259) |
| VL | DIQMTQSPSSLSASVGDRVTITCRASQGISSWLAWYQQKPEKAPKSLIYAASSLQSGVPSRFSGSGSGTDFT |
| | LTISSLQPEDFATYYCQQYNSYPYTFGQGTKLEIK (SEQ ID NO: 260) |
| VL | EIVLTQSPGTLSLSPGERATLSCRASQSVSSSYLAWYQQKPGQAPRLLIYGASSRATGIPDRFSGSGSGTDF |
| | TLTISRLEPEDFAVYYCQQYGSSPWTFGQGTKVEIK (SEQ ID NO: 261) |
| VL | EIVLTQSPGTLSLSPGERATLSCRASQSVSSSYLAWYQQKPGQAPRLLIYGASSRATGIPDRFSGSGSGTDF |
| | TLTISRLEPEDFAVYYCQQYGSSPFGGGTKVEIK (SEQ ID NO: 262) |
| VL | EIVLTQSPATLSLSPGERATLSCRASQSVSSYLAWYQQKPGQAPRLLIYDASNRATGIPARFSGSGSGTDFT |
| | LTISSLEPEDFAVYYCQQRSNWPTFGQGTRLEIK (SEQ ID NO: 263) |
| VL | AIQLTQSPSSLSASVGDRVTITCRASQGISSALAWYQQKPGKAPKLLIYDASSLESGVPSRFSGSGSGTDFT |
| | LTISSLQPEDFATYYCQQFNSYPFTFGPGTKVDIK (SEQ ID NO: 264) |

Group E

| | |
|---|---|
| VH | EVQLLESGGGLVQPGGSLRLSCAASGFTFSSYIMMWVRQAPGKGLEWVSSIYPSGGITFYADTVKGRFTISR |
| | DNSKNTLYLQMNSLRAEDTAVYYCARIKLGTVTTVDYWGQGTLVTVSS (SEQ ID NO: 471) |
| VL | QSALTQPASVSGSPGQSITISCTGTSSDVGGYNYVSWYQQHPGKAPKLMIYDVSNRPSGVSNRFSGSKSGNT |
| | ASLTISGLQAEDEADYYCSSYTSSSTRVFGTGTKVTVL (SEQ ID NO: 472) |

Group F

| | |
|---|---|
| VH | EVKLQESGPSLVKPSQTLSLTCSVTGYSITSDYWNWIRKFPGNKLEYVGYISYTGSTYYNPSLKSRISITRD |
| | TSKNQYYLQLNSVTSEDTATYYCARYGGWLSPFDYWGQGTTLTVSS (SEQ ID NO: 473) |
| VH | EVQLQESGPGLVAPSQSLSITCTVSGFSLTTYSINWIRQPPGKGLEWLGVMWAGGGTNSNSVLKSRLIISKD |
| | NSKSQVFLKMNSLQTDDTARYYCARYYGNSPYYAIDYWGQGTSVTVSS (SEQ ID NO: 474) |
| VH | EVKLQESGPSLVKPSQTLSLTCSVTGYSIISDYWNWIRKFPGNKLEYLGYISYTGSTYYKPSLKSRISITRD |
| | TSKNQYYLQLNSVTTEDTATYYCARRGGWLLPFDYWGQGTTLTVSS (SEQ ID NO: 475) |
| VH | EVKLQESGPSLVKPGASVKLSCKASGYTFTSYDINWVKQRPGQGLEWIGWIFPRDNNTKYKENFKGKATLTV |
| | DTSSTTAYMELHSLTSEDSAVYFCTKENWVGDFDYWGQGTTLTLSS (SEQ ID NO: 476) |
| VH | EVQLQQSGPDLVTPGASVRISCQASGYTFPDYYMNWVKQSHGKSLEWIGDIDPNYGGTTYNQKFKGKAILTV |
| | DRSSSTAYMELRSLTSEDSAVYYCARGALTDWGQGTSLTVSS (SEQ ID NO: 477) |
| VH | EIVLTQSPATLSLSPGERATLSCRASSSVSYIYWFQQKPGQSPRPLIYAAFNRATGIPARFSGSGSGTDYTL |
| | TISSLEPEDFAVYYCQQWSNNPLTFGQGTKVEIK (SEQ ID NO: 478) |
| VH | QVQLVQSGAEVKKPGASVKVSCKASGYTFPDYYMNWVRQAPGQGLEWMGDIDPNYGGTNYAQKFQGRVTMTR |
| | DTSISTAYMELSRLRSDDTAVYYCARGALTDWGQGTMVTVSS (SEQ ID NO: 479) |
| VH | QVQLVQSGAEVKKPGASVKVSCKASGYTFPDYYMNWVRQAPGQSLEWMGDIDPNYGGTNYNQKFQGRVTMTR |
| | DTSISTAYMELSRLRSDDTAVYYCARGALTDWGQGTMVTVSS (SEQ ID NO: 480) |
| VH | EVQLVQSGAEVKKPGASVKVSCKASGYTFPDYYMNWVRQAPGQSLEWMGDIDPNYGGTNYNQKFQGRVTMTV |
| | DRSSSTAYMELSRLRSDDTAVYYCARGALTDWGQGTMVTVSS (SEQ ID NO: 481) |
| VH | EVQLVESGGGLVQPGRSLRLSCTASGYTFPDYYMNWVRQAPGKGLEWVGDIDPNYGGTTYAASVKGRFTISV |
| | DRSKSIAYLQMSSLKTEDTAVYYCTRGALTDWGQGTMVTVSS (SEQ ID NO: 482) |
| VH | EVQLVESGGGLVQPGRSLRLSCTASGYTFPDYYMNWVRQAPGKGLEWVGDIDPNYGGTTYNASVKGRFTISV |
| | DRSKSIAYLQMSSLKTEDTAVYYCARGALTDWGQGTMVTVSS (SEQ ID NO: 483) |
| VL | DIVMTQSHKLMSTSVGDRVSITCKASQDVGTAVAWYQQKPGQSPKLLIYWASTRHTGVPDRFTGSGSGTDFT |
| | LTISNVQSEDLADYFCQQDSSYPLTFGAGTKVELK (SEQ ID NO: 484) |
| VL | DIVTTQSHKLMSTSVGDRVSITCKASQDVGTAVAWYQQKPGQSPKLLIYWASTRHTGVPDRFTGSGSGTDFT |
| | LTISNVQSEDLADYFCQQDSSYPLTFGAGTKVELK (SEQ ID NO: 485) |
| VL | DIVMTQSPSSLAVSVGEKVSMGCKSSQSLLYSSNQKNSLAWYQQKPGQSPKLLIDWASTRESGVPDRFTGSG |
| | SGTDFTLTISSVKAEDLAVYYCQQYYGYPLTFGAGTKLELK (SEQ ID NO: 486) |
| VL | DIVMTQSPAIMSASPGEKVTMTCSASSSIRYMHWYQQKPGTSPKRWISDTSKLTSGVPARFSGSGSGTSYAL |
| | TISSMEAEDAATYYCHQRSSYPWTFGGGTKLEIK (SEQ ID NO: 487) |
| VL | QIVLSQSPAILSASPGEKVTMTCRASSSVSYIYWFQQKPGSSPKPWIYATFNLASGVPARFSGSGSGTSYSL |
| | TISRVETEDAATYYCQQWSNNPLTFGAGTKLELK (SEQ ID NO: 488) |
| VL | EIVLTQSPATLSLSPGERATLSCRASSSVSYIYWFQQKPGQAPRLLIYAAFNRATGIPARFSGSGSGTDYTL |
| | TISSLEPEDFAVYYCQQWSNNPLTFGQGTKVEIK (SEQ ID NO: 489) |
| VL | QIVLTQSPATLSLSPGERATLSCRASSSVSYIYWFQQKPGQSPRPLIYATFNLASGIPARFSGSGSGTSYTL |
| | TISRLEPSDFAVYYCQQWSNNPLTFGQGTKVEIK (SEQ ID NO: 490) |
| VL | DIQLTQSPSSLSASVGDRVTITCRASSGVSYIYWFQQKPGKAPKLLIYAAFNLASGVPSRFSGSGSGTEYTL |
| | TISSLQPSDFATYYCQQWSNNPLTFGQGTKVEIK (SEQ ID NO: 491) |
| VL | DIQLTQSPSSLSASVGDRVTITCRASSGVSYIYWFQQKPGKAPKPLIYAAFNLASGVPSRFSGSGSGTEYTL |
| | TISSLQPEDFATYYCQQWSNNPLTFGQGTKVEIK (SEQ ID NO: 492) |
| VL | DIQLTQSPSILSASVGDRVTITCRASSSVSYIYWFQQKPGKAPKPLIYATFNLASGVPSRFSGSGSGTSYTL |
| | TISSLQPEDFATYYCQQWSNNPLTFGQGTKVEIK (SEQ ID NO: 493) |

Group G

| | |
|---|---|
| VH | QVQLVQSGAEVKKPGASVKVSCKASGYTFTSYGISWVRQAPGQGLEWMGWISAYNGNTNYAQKLQGRVTMTT |
| | DTSTSTAYMELRSLRSDDTAVYYCARALPSGTILVGGWFDPWGQGTLVTVSS (SEQ ID NO: 494) |
| VH | QVQLVQSGGGVVQPGRSLRLSCAASGFTFSSYALSWVRQAPGKGLEWVSAISGGGGSTYYADSVKGRFTISR |
| | DNSKNTLYLQMNSLRAEDTAVYYCAKDVFPETFSMNYGMDVWGQGTLVTVSS (SEQ ID NO: 495) |
| VH | QVQLVQSGGGVVQPGGSLRLSCAASGFTFDDYAMHWVRQAPGKGLEWVSLISGDGGSTYYADSVKGRFTISR |
| | DNSKNSLYLQMNSLRTEDTALYYCAKVLLPCSSTSCYGSVGAFDIWGQGTTVTVSS (SEQ ID |
| | NO: 496) |
| VH | QVQLVQSGGSVVRPGESLRLSCVASGFIFDNYDMSWVRQVPGKGLEWVSRVNWNGGSTTYADAVKGRFTISR |
| | DNTKNSLYLQMNNLRAEDTAVYYCVREFVGAYDLWGQGTTVTVSS (SEQ ID NO: 497) |
| VH | QVQLVQSGAEVKKPGATVKVSCKVFGDTFRGLYIHWVRQAPGQGLEWMGGIIPIFGTANYAQKFQGRVTITT |
| | DESTSTAYMELSSLRSEDTAVYYCASGLRWGIWGWFDPWGQGTLVTVSS (SEQ ID NO: 498) |
| VH | EVQLVQSGAELKKPGSSVKVSCKAFGGTFSDNAISWVRQAPGQGPEWMGGIIPIFGKPNYAQKFQGRVTITA |
| | DESTSTAYMVLSSLRSEDTAVYYCARTMVRGFLGVMDVWGQGTTVTVSS (SEQ ID NO: 499) |
| VH | QVQLVQSGGGLVQPGGSLRLSCAASGFTFSSYAMSWVRQAPGKGLEWVSAISGSGGSTYYADSVKGRFTISR |
| | DNSKNTLYLQMNSLRAEDTAVYYCAKDQFVTIFGVPRYGMDWGQGTTVTVSS (SEQ ID NO: 500) |
| VH | QVQLVQSGAEVKKPGSSVKVSCKASGGTFSSYAISWVRQAPGQGLEWMGGIIPIFGTANYAQKFQGRVTITA |
| | DKSTSTAYMELSSLRSEDTAVYYCARGRQMFGAGIDFWGPGTLVTVSS (SEQ ID NO: 501) |
| VH | EVQLVESGAEVKKPGSSVKVSCKVSGGTFGTYALNWVRQAPGQGLEWMGRIVPLIGLVNYAHNFEGRISITA |
| | DKSTGTAYMELSNLRSDDTAVYYCAREVYGGNSDYWGQGTLVTVSS (SEQ ID NO: 502) |
| VH | QVQLVQSGGEVKKPGASVKVSCKASGYTLSSHGITWVRQAPGQGLEWMGWISAHNGHASNAQKVEDRVTMTT |
| | DTSTNTAYMELRSLTADDTAVYYCARVHAALYYGMDVWGQGTLVTVSS (SEQ ID NO: 503) |
| VH | QVQLQESGGGVVQPGRSLRLSCSASGFTFSRHGMHWVRQAPGKGLEWVAVISHDGSVKYYADSMKGRFSISR |
| | DNSNNTLYLQMDSLRADDTAVYYCARGLSYQVSGWFDPWGQGTLVTVSS (SEQ ID NO: 504) |
| VH | NFMLTQPHSVSESPGKTVTISCTRSSGSIASNYVQWYQQRPGSSPTTVIYEDNQRPSGVPDRFSGSIDTSSN |
| | SASLTISGLKTKDEADYYCQSYDGITVIFGGGTKLTVL (SEQ ID NO: 505) |
| VH | NFMLTQPHSVSGSPGKTVTLPCTRSSGSIASHYVQWYQQRPGSAPTTVIYEDNKRPSGVPDRFSGSIDSSSN |
| | SASLSISGLKTEDEADYYCQSYDSSNRWVFGGGTKLTVL (SEQ ID NO: 506) |
| VH | LPVLTQPASLSASPGASASLTCTLRSGLNVGSYRIYWYQQKPGSRPQYLLNYKSDSNKQQASGVPSRFSGSK |
| | DASANAGILLISGLQSEDEADYYCMIWYSSAVVFGGGTKLTVL (SEQ ID NO: 507) |
| VL | NFMLTQPHSVSESPGKTVTISCTRSSGNIASNYVQWYQQRPGSAPTTVIYEDNQRPSGVPDRFSGSIDSSSN |
| | SASLTISGLKTEDEADYYCQSYDSSNLWVFGGGTKLTVL (SEQ ID NO: 508) |
| VL | SSELTQDPAVSVALGQTVRITCQGDSLRSYYASWYQQKPGQAPVLVIYGKNNRPSGIPDRFSGSSSGNTASL |
| | TITGAQAEDEADYYCNSRDSSGNHYVFGTGTKVTVL (SEQ ID NO: 509) |
| VL | LPVLTQAPSVSVAPGKTARITCGGSDIGRKSVHWYQQKPGQAPALVIYSDRDRPSGISERFSGSNSGNTATL |
| | TISRVEAGDEADYYCQVWDNNSDHYVFGAGTELIVL (SEQ ID NO: 510) |
| VL | QSALTQPASVSGSPGQSITISCTGTSSDVGGYNYVSWYQQHPGKAPKLMIYDVSNRPSGVSNRFSGSKSGNT |
| | ASLTISGLQAEDEADYYCSSYTSSTLPFGGGTKLTVL (SEQ ID NO: 511) |
| VL | EIVLTQSPATLSLSPGERATLSCRASQSIGNSLAWYQQKPGQAPRLLMYGASSRATGIPDRFSGSGAGTDFT |
| | LTISSLEPEDFATYYCQQHTIPTFSFGPGTKVEVK (SEQ ID NO: 512) |
| VL | DIVMTQTPSFLSASIGDRVTITCRASQGIGSYLAWYQQRPGEAPKLLIYAASTLQSGVPSRFSGSGSGTDFT |
| | LTISNLQPEDFATYYCQQLNNYPITFGQGTRLEIK (SEQ ID NO: 513) |
| VL | QSALTQPPSVSVSPGQTANIPCSGDKLGNKYAYWYQQKPGQSPVLLIYQDIKRPSRIPERFSGSNSADTATL |
| | TISGTQAMDEADYYCQTWDNSVVFGGGTKLTVL (SEQ ID NO: 514) |
| VL | NFMLTQPHSVSESPGKTVTISCTRSSGSIDSNYVQWYQQRPGSAPTTVIYEDNQRPSGVPDRFSGSIDSSSN |
| | SASLTISGLKTEDEADYYCQSYDSNNRHVIFGGGTKLTVL (SEQ ID NO: 515) |
| VL | NFMLTQPHSVSESPGKTVTISCTRSSGNIGTNYVQWYQQRPGSAPVALIYEDYRRPSGVPDRFSGSIDSSSN |
| | SASLIISGLKPEDEADYYCQSYHSSGWEFGGGTKLTVL (SEQ ID NO: 516) |
| VL | QSVLTQPPSVSVAPGQTARITCGGNNIGSKGVHWYQQKPGQAPVLVVYDDSDRPSGIPERFSGSNSGNTATL |
| | TISRVEAGDERDYYCQVWDSSSDHWVFGGGTKLTVL (SEQ ID NO: 517) |
| VL | NFMLTQPHSVSESPGKTVTISCTRSSGSIASNYVQWYQQRPGSAPTTVIYEDNQRPSGVPDRFSGSIDSSSN |
| | SASLTISGLKTEDEADYYCQSYDSTTPSVFGGGTKLTVL (SEQ ID NO: 518) |
| VL | QVQLVQSGAEVKKPGASVKVSCKASGYTFTSYGISWVRQAPGQGLEWMGWTSPHNGLTAFAQILEGRVTMTT |
| | DTSTNTAYMELRNLTFDDTAVYFCAKVHPVFSYALDVWGQGTLVTVSS (SEQ ID NO: 519) |
| VL | EVQLVESGAEVMNPGSSVRVSCRGSGGDFSTYAFSWVRQAPGQGLEWMGRIIPILGIANYAQKFQGRVTITA |
| | DKSTSTAYMELSSLRSDDTAVYYCARDGYGSDPVLWGQGTLVTVSS (SEQ ID NO: 520) |
| VL | EVQLVQSGAEVKKPGASVKVSCKASGYTFTNYGISWVRQAPGQGLEWMGWISAYNGNTNYAQKVQGRVTMTT |
| | DTSTSTGYMELRSLRSDDTAVYYCARGDFRKPFDYWGQGTLVTVSS (SEQ ID NO: 521) |

Group H

| | |
|---|---|
| VH | EVQLVQSGPELKKPGASVKMSCKASGYTFTSYVMHWVKQAPGQRLEWIGYVNPFNDGTKYNEMFKGRATLTS |
| | DKSTSTAYMELSSLRSEDSAVYYCARQAWGYPWGQGTLVTVSS (SEQ ID NO: 522) |
| VH | EVQLVQSGAEVKKPGASVKMSCKASGYTFTSYVMHWVKQAPGQRLEWIGYVNPFNDGTKYNEMFKGRATLTS |
| | DKSTSTAYMELSSLRSEDTAVYYCARQAWGYPWGQGTLVTVSS (SEQ ID NO: 523) |
| VH | EVQLVQSGAEVKKPGASVKMSCKASGYTFTSYVMHWVRQAPGQRLEWIGYVNPFNDGTKYNEMFKGRATLTS |
| | DKSTSTAYMELSSLRSEDTAVYYCARQAWGYPWGQGTLVTVSS (SEQ ID NO: 524) |
| VH | EVQLVQSGAEVKKPGASVKVSCKASGYTFTSYVMHWVRQAPGQRLEWIGYVNPFNDGTKYNEMFKGRATLTS |
| | DKSTSTAYMELSSLRSEDTAVYYCARQAWGYPWGQGTLVTVSS (SEQ ID NO: 525) |
| VH | EVQLVQSGAEVKKPGASVKVSCKASGYTFTSYVMHWVRQAPGQRLEWIGYVNPFNDGTKYNEMFKGRATITS |
| | DKSTSTAYMELSSLRSEDTAVTYCARQAWGYPWGQGTLVTVSS (SEQ ID NO: 526) |
| VL | DIVLTQSPASLALSPGERATLSCRATESVEYYGTSLVQWYQQKPGQPPKLLIYAASSVDSGVPSRFSGSGSG |
| | TDFTLTINSLEEEDAAMYFCQQSRRVPYTFGQGTKLEIK (SEQ ID NO: 527) |
| VL | DIVLTQSPATLSLSPGERATLSCRATESVEYYGTSLVQWYQQKPGQPPKLLIYAASSVDSGVPSRFSGSGSG |
| | TDFTLTINSLEAEDAAMYFCQQSRRVPYTFGQGTKLEIK (SEQ ID NO: 528) |
| VL | EIVLTQSPATLSLSPGERATLSCRATESVEYYGTSLVQWYQQKPGQPPKLLIYAASSVDSGVPSRFSGSGSG |
| | TDFTLTINSLEAEDAAMYFCQQSRRVPYTFGQGTKLEIK (SEQ ID NO: 529) |
| VL | DIVLTQSPATLSLSPGERATLSCRATESVEYYGTSLVQWYQQKPGQPPKLLIYAASSVDSGVPSRFSGSGSG |
| | TDFTLTINSLEAEDAATYFCQQSRRVPYTFGQGTKLEIK (SEQ ID NO: 530) |

Group I

| | |
|---|---|
| VH | EVQLVQSGAEVKKPGSSVKVSCKASGGTFSSYAISWVRQAPGQGLEWMGGIIPIFGTANYAQKFQGRVTITA |
| | DKSTSTAYMELSSLRSEDTAVYYCAREGTIYDSSGYSFDYWGQGTLVTVSS (SEQ ID NO: 531) |
| VH | EVQLVQSGAEVKKPGSSVKVSCKASGGTFSSYAISWVRQAPGQGLEWMGIIKPSGGSTSYAQKFQGRVSMTR |
| | DTSTSTVYMELSSLTSEDTAVYYCARDLFPHIYGNYYGMDIWGQGTTVTVSS (SEQ ID NO: 532) |
| VH | QVQLVQSGAEVKKPGSSVKVSCKASGGTFSSYAISWVRQAPGQGLEWMGGIIPIFGTANYAQKFQGRVTITA |
| | DKSTSTAYMELSSLRSEDTAVYYCARLAVPGAFDIWGQGTMVTVSS (SEQ ID NO: 533) |
| VH | EVQLVESGGGVVQPGRSLRLSCAASGFTFSSYAMHWVRQAPGKGLAVISYDGSNKYYADSVKGRFTISRDNS |
| | KNTLYLQMNSLRAEDTAVYYCARGQWLVTELDYWGQGTLVTVSS (SEQ ID NO: 534) |
| VH | EVQLVESGSEVEKPGSSVKVSCKASGGTFSDSGISWVRQAPGQGLEWMGGIIPMFATPYYAQKFQDRVTITA |
| | DESTSTVYMELSGLRSDDTAVFYCARDRGRGHLPWYFDLWGRGTLVTVSS (SEQ ID NO: 535) |
| VH | EVQLVESGAEVKKPGSSVKVSCKASGGTFSSYAISWVRQAPGQGLEWMGGIIPIFGTANYAQKFQGRVTITA |
| | DESTSTAYMELSSLRSEDTAVYYCARAPYYYYYMDVWGQGTTVTVSS (SEQ ID NO: 536) |
| VH | EVQLLESGAEVKKPGSSVKVSCKASGGTLSRYALSWVRQAPGQGPEWVGAIIPIFGTPHYSKKFQDRVTITV |
| | DTSTNTAFMELSSLRFEDTALYFCARGHDEYDISGYHRLDYWGQGTLVTVSS (SEQ ID NO: 537) |
| VH | QVQLVQSGSELKKPGSSVKVSCKASGYSFSGYYIHWVRQAPGQGLEVWMGWIDPNSGVTNYVRRFQGRVTMTR |
| | DTSLSTAYMELSGLTADDTAVYYCARDENLWQFGYLDYWGQGTLVTVSS (SEQ ID NO: 538) |
| VH | QVQLVQSGAEVKKPGSSVKVSCKASGGTFSRYGVHWVRQAPGQGLEWMGRLIPIVSMTNYAQKFQDRVSITT |
| | DKSTGTAYMELRSLTSEDTALYYCASVGQQLPWVFFAWGQGTLVTVSS (SEQ ID NO: 539) |
| VH | QVQLVESGGGVVQPGRSLRLSCAASGFTFSSYAMHWVRQAPGKGLEWVAVISFDGSNKYYADSVRGRFTISR |
| | DNSKNTLYLQMNSLRTEDTAVYYCARGWLDRDIDYWGQGTLVTVSS (SEQ ID NO: 540) |
| VH | EVQLVESGGGVVQPGRSLRLSCAASGFTFSSYAMHWVRQAPGKGLEWVAVISFDGSNKYYADSVRGRFTISR |
| | DNSKNTLYLQMNSLRTEDTAVYYCARGWLDRDIDYWGQGTLVTVSS (SEQ ID NO: 541) |
| VH | EVQLVQSGGGLVQPGGSLRLSCAASGFTFSDYGMHWVRQPPGKGLEWLAVISYDGSYKIHADSVQGRFTISR |
| | DNAKNSVFLQMNSLKTEDTAVYYCTTDRKWLAWHGMDVWGQGTTVTVSS (SEQ ID NO: 542) |
| VH | EVQLVQSGAEVKKPGSSVKVSCKASGGTFSSYAISWVRQAPGQGLEWMGGIIPIFGTANYAQKFQGRVTITA |
| | DESTSTAYMELSSLRSEDTAVYYCARDGIVADFQHWGQGTLVTVSS (SEQ ID NO: 543) |
| VH | EVQLVESGAEVKKPGASVKVSCKASGDTFSRYGITWVRQAPGRGLEWMGNIVPFFGATNYAQKFQGRLTITA |
| | DKSSYTSYMDLSSLRSDDTAVYYCARDHFYGSGGYFDYWGQGTLVTVSS (SEQ ID NO: 544) |
| VH | EVQLLESGAEVKKPGASVKVSCKASGYTFNSYDINWVRQAPGQGLEWMGGIIPVFGTANYAESFQGRVTMTA |
| | DHSTSTAYMELNNLRSEDTAVYYCARDRWHYESRPMDVWGQGTTVTVSS (SEQ ID NO: 545) |
| VH | EVQLVESGGGLVRPGGSLRLACAASGFSFSDYYMTWIRQAPGRGLEWIAYISDSGQTVHYADSVKGRFTISR |
| | DNTKNSLFLQVNTLRAEDTAVYYCAREDLLGYYLQSWGQGTLVTVSS (SEQ ID NO: 546) |
| VH | QVQLQQSGPGLVKPSQTLSLTCAISGDSVSSNSAAWNWIRQSPSRGLEWLGRTYYRSKWYNDYAVSVKSRIT |
| | INPDTSKNQFSLQLNSVTPEDTAVYYCARDEPRAVAGSQAYYYYGMDWGQGTTVTVSS (SEQ ID |
| | NO: 547) |
| VH | EVQLVQSGAEVKKPGASVKVSCKASGYTFTSYYMHWVRQAPGQGLEWMGIINPSDGSTSYAQKFQGRVTMTR |
| | DTSTSTVHMELSSLRSEDTAVYYCARDLFPHIYGNYYGMDIWGQGTTVTVSS (SEQ ID NO: 548) |
| VH | QMQLVQSGGGVVQPGRSLRLSCAASGFTFSSYAMHWVRQAPGKGLEWVAVISFDGSNKYYADSVRGRFTISR |
| | DNSKNTLYLQMNSLRTEDTAVYYCARGWLDRDIDYWGQGTLVTVSS (SEQ ID NO: 549) |
| VH | QVQLVQSGGGVVQPGRSLRLSCAASGFTFSSYAMHWVRQAPGKGLEWVAVISFDGSNKYYADSVRGRFTISR |
| | DNSKNTLYLQMNSLRTEDTAVYYCARGWLDRDIDYWGQGTLVTVSS (SEQ ID NO: 550) |
| VL | QSVLTQPPSVSAAPGQKVTISCSGNNSNIANNYVSWYQQLPGTAPKLLIYDNNYRPSGIPDRFSGSKSGTSA |
| | TLDITGLQTGDEADYYCGVWDGSLTTGVFGGGTKLTVL (SEQ ID NO: 551) |
| VL | AIQMTQSPSSLSASVGDRVTITCRASQGISNYLAWYQQKPGKVPKLLIYAASTLESGVPSRFSGSGSGTDFT |
| | LTISSLQPEDLATYYCQQLHTFPLTFGGGTKVEIK (SEQ ID NO: 552) |
| VL | QPVLTQPPSASGSPGQSVTISCTGTSSDVGAYNFVSWYRQHPGKAPKLMIYEVNKRPSGVPDRFSGSKSGNT |
| | ASLTVSGLQAEDEADYYCSSYAGTNSLGIFGTGTKLTVL (SEQ ID NO: 553) |
| VL | QSVVTQPPSVSAAPGQKVTISCSGSSSDIGNHYVSWYQQLPGTAPKLLIYDNNQRPSGIPDRFSGSKSGTSA |
| | TLAITGLQTGDEADYYCGTWDNSLSPHLLFGGGTKLTVL (SEQ ID NO: 554) |
| VL | QSVLTQPPSVSAAPGQKVTISCSGSSSNMGNNYVSWYKQVPGTAPKLLIYENDKRPSGIPDRFSGSKSGTSA |
| | TLGITGLQTGDEADYYCGTWDNSLSGFVFASGTKVTVL (SEQ ID NO: 555) |
| VL | QSALTQPASVSGSLGQSVTISCTGSSSDVGSYNLVSWYQQHPGKAPNLMIYDVSKRSGVSNRFSGSKSGNTA |
| | SLTISGLQAEDEADYYCSSYTGISTVVFGGGTKLTVL (SEQ ID NO: 556) |
| VL | QSVLTQPASVSGSPGQSITISCTGTSSDVGSYNLVSWYQQHPGKAPKLMIYEVSKRPSGVSNRFSGSKSGNT |
| | ASLTISGLQAEDEADYYCSSYGGFNNLLFGGGTKLTVL (SEQ ID NO: 557) |
| VL | DIVMTQSPSSLSASIGDRVTITCRASQRISAYVNWYQQKPGKAPKVLIYAASSLRSGVPSRFSGSGSGTDFT |
| | LTISSLQPEDFATYYCQQTYSSPWTFGQGTKVEIK (SEQ ID NO: 558) |
| VL | QSVLTQPPSASGSPGQSVTISCTGTSSDIGGYDSVSWYQQHPGKAPKLMIYDVSKRPSGVSNRFSGSKSGNT |
| | ASLTISGLQAEDEADYYCSSYTSSSIFFYVFGTGTKVTVL (SEQ ID NO: 559) |
| VL | LPVLTQPASVSGSPGQSITISCTGTTSDIGGYDYVSWYQQHPGKAPKLMIYDVSKRPSGVSNRFSGSKSGNT |
| | ASLTISGLQAEDEADYYCSSYTSSSTHVFGTGTKLTVL (SEQ ID NO: 560) |
| VL | QSALTQPASVSGSPGQSITISCTGTSSDVGGYNYVSWYQQHPGKAPKLMIYDVSNRPSGVSNRFSGSKSGNT |
| | ASLTISGLQAEDEADYYCSSYRSSTLGPVFGGGTKLTVL (SEQ ID NO: 561) |
| VL | QAGLTQPPSVSEAPRQRVTISCSGSSSNIGNNAVNWYQQLPGKAPKLLIYYDDLLPSGVSDRFSGSKSGTSA |
| | SLAISGLQSEDEADYYCAAWDDSLNGYVFGTGTKLTVL (SEQ ID NO: 562) |
| VL | QSALTQPRSVSGSPGQSVTISCTGTSSDVGGYNYVSWYQQHPGKAPKLMIYDVSKRPSGVPDRFSGSKSGNT |
| | ASLTISGLQAEDEADYYCSSYTSSTTHVFGTGTKVTVL (SEQ ID NO: 563) |
| VL | QSVVTQPPSVSAAPGQKVTISCSGSSSNIGNNYVSWYQQLPGTAPKLLIYDNNKRPSGIPDRFSGSKSGTSA |
| | TLGITGLQTGDEADYYCGTWDSSLSVWVFGGGTQLTVL (SEQ ID NO: 564) |
| VL | QSVLTQPASVSGSPGQSITISCTGTSSDVGGYNYVSWYQQHPGRAPRLMIYDVSNRPSGVSNRFSGSKSGNT |
| | ASLTISGLQAEDEGDYYCSSYTSGGTLGPVFGGGTKLTVL (SEQ ID NO: 565) |
| VL | QAGLTQPPSASGTPGQRVTISCSGSSSNIGSNTVNWYQQLPGTAPKLLIYSNNQRPSGVPDRFSGSKSGTSA |
| | SLAISGLQSEDEADYYCAAWDDSLNGWFGGGTKLTVL (SEQ ID NO: 566) |
| VL | AIRMTQSPSSLSASVGDRVTITCRASQSISNYLNWYQQRPGKAPNLLIYAASSLQSGVPSRFSGSGSGTDFT |
| | LTISSLQPEDFATYYCQQTYSTPYTFGQGTKLEIK (SEQ ID NO: 567) |
| VL | QSVLTQPASVSGSPGQSITISCTGTSSDVGGYNYVSWYRQHPGKAPKLMIYDVSYRPSGVSNRFSGSKSGNT |
| | ASLTISGLQAEDEADYYCSSYTDSSTRYVFGTGTKLTVL (SEQ ID NO: 568) |
| VL | QPVLTQPPSASGTPGQRVAISCSGSRSKIEINSVNWYQQLPGTAPKLLIYDKNKRPSGIPDRFSGSKSGTSA |
| | TLGITGLQTGDEADYYCGSWDSSLSADVFGTGTKLTVL (SEQ ID NO: 569) |
| VL | QSVLTQPPSVSAAPGKKVTISCSGSSSNIGNNYVSWYQQLPGTAPKLLIYRNNQRPSGVPDRFSGSKSGTSA |
| | SLAISGLQSEDEADYYCATWDDSLNGWVFGGGTKLTVL (SEQ ID NO: 570) |
| VL | QSVVTQPPSVSGAPGQRVTISCTGSSSNIGAGYDVHWYQQLPGTAPKLLIYGNNNRHSGVPDRFSGSKSGTS |
| | ASLAITGLQAEDEAEFFCGTWDSRLTTYVFGSGTKLTVL (SEQ ID NO: 571) |
| VL | QSVVTQPPSVSAAPGQKVTISCSGSSSNIGNNYVSWYQQLPGTAPKLLIYDNNKRPSGIPDRFSGSKSGTSA |
| | TLGITGLQTGDEADYYCGTWDSSLSAVVFGGGTKLTVL (SEQ ID NO: 572) |
| VL | VIWMTQSPSSLSASVGDRVTITCAASSLQSWYQQKPGKAPKLLIYEASTLESGVPSRFSGSGSGTEFTLTIS |
| | SLQPEDFATYYCQQSYSTPYTFGQGTKLEIK (SEQ ID NO: 573) |
| VL | QSVVTQPPSVSAAPGQKVTISCSGSSSNIGNNYVSWYQQVPGTAPKLLIYDNNKRPSGIPDRFSGSNSDTSA |
| | TLGITGLQTGDEADYYCGTWDSSLSAWVFGGGTKLTVL (SEQ ID NO: 574) |
| VL | QSVVTQPPSVSAAPGQKVTISCSGSSSNIGNNYVSWYQQLPGTAPKLLIYDNNKRPSGIPDRFSGSKSGTSA |
| | TLGITGLQTGDEADYYCGTWDSSLSAGSWFGGGTKLTVL (SEQ ID NO: 575) |
| VL | SYELMQPPSVSVAPGKTATIACGGENIGRKTVHWYQQKPGQAPVLVIYYDSDRPSGIPERFSGSNSGNTATL |
| | TISRVEAGDEADYYCLWDSSSDHRIFGGGTKLTVL (SEQ ID NO: 576) |
| VL | SYELMQPPSVSVAPGKTATIACGGENIGRKTVHWYQQKPGQAPVLVIYYDSDRPSGIPERFSGSNSGNTATL |
| | TISRVEAGDEADYYCQWDSSSDHRIFGGGTKLTVL (SEQ ID NO: 577) |
| VL | SYELMQPPSVSVAPGKTATIACGGENIGRKTVHWYQQKPGQAPVLVIYYDSDRPSGIPERFSGSNSGNTATL |
| | TISRVEAGDEADYYCQVWDSSSDHRIFGGGTKLTVL (SEQ ID NO: 578) |
| VL | SYELMQPPSVSVAPGKTATIACGGENIGRKTVHWYQQKPGQAPVLVIYYDSDRPSGIPERFSGSNSGNTATL |
| | TISRVEAGDEADYYCQVWDSSSDHRIFGGGTKLTVL (SEQ ID NO: 579) |

Group J*

| | |
|---|---|
| HC | QVQLVQSGVEVKKPGASVKVSCKASGYTFTNYYMYWVRQAPGQGLEWMGGINPSNGGTNFNEKFKNRVTLTT |
| | DSSTTTAYMELKSLQFDDTAVYYCARRDYRFDMGFDYWGQGTTVTVSSASTKGPSVFPLAPCSRSTSESTAA |
| | LGCLVKDYFPEPVTVSWNSGALTSGVHTFPAVLQSSGLYSLSSVVTVPSSSLGTKTYTCNVDHKPSNTKVDK |
| | RVESKYGPPCPPCPAPEFLGGPSVFLFPPKPKDTLMISRTPEVTCVVVDVSQEDPEVQFNWYVDGVEVHNAK |
| | TKPREEQFNSTYRVVSVLTVLHQDWLNGKEYKCKVSNKGLPSSIEKTISKAKGQPREPQVYTLPPSQEEMTK |
| | NQVSLTCLVKGFYPSDIAVEWESNGQPENNYKTTPPVLDSDGSFFLYSRLTVDKSRWQEGNVFSCSVMHEAL |
| | HNHYTQKSLSLSLGK (SEQ ID NO: 580) |
| HC | QVQLVESGGGVVQPGRSLRLDCKASGITFSNSGMHWWVRQAPGKGLEWVAVIWYDGSKRYYADSVKGRFTISR |
| | DNSKNTLFLQMNSLRAEDTAVYYCATNDDYWGQGTLVTVSSASTKGPSVFPLAPCSRSTSESTAALGCLVKD |
| | YFPEPVTVSWNSGALTSGVHTFPAVLQSSGLYSLSSVVTVPSSSLGTKTYTCNVDKKPSNTKVDKRVESKYG |
| | PPCPPCPAPEFLGGPSVFLFPPKPKDTLMISRTPEVTCVVVDVSQEDPEVQFNWYVDGVEVHNAKTKPREEQ |
| | FNSTYRVVSVLTVLHQDWLNGKEYKCKVSNKGLPSSIEKTISKAKGQPREPQVYTLPPSQEEMTKNQVSLTC |
| | LVKGFYPSDIAVEWESNGQPENNYKTTPPVLDSDGSFFLYSRLTVDKSRWQEGNVFSCSVMHEALHNHYTQK |
| | SLSLSLGK (SEQ ID NO: 581) |
| LC | EIVLTQSPATLSLSPGERATLSCRASKGVSTSGYSYLHWYQQKPGQAPRLLIYLASYLESGVPARFSGSGSG |
| | TDFTLTISSLEPEDFAVYYCQHSRDLPLTFGGGTKYEIKRTVAAPSVFIFPPSDEQLKSGTASVVCLLNNFY |
| | PREAKVQWKVDNALQSGNSQESVTEQDSKDSTYSLSSTLTLSKADYEKHKVYACEVTHQGLSSPVTKSFNRG |
| | EC (SEQ ID NO: 582) |
| LC | EIVLTQSPATLSLSPGERATLSCRASQSVSSYLAWYQQKPGQAPRLLIYDASNRATGIPARFSGSGSGTDFT |
| | LTISSLEPEDFAVYYCQQSSNWPRTFGQGTKVEIKRTVAAPSVFIFPPSDEQLKSGTASVVCLLNNFYPREA |
| | KVQWKVDNALQSGNSQESVTEQDSKDSTYSLSSTLTLSKADYEKHKVYACEVTHQGLSSPVTKSFNRGEC |
| | (SEQ ID NO: 583) |

Group K

| | |
|---|---|
| VH | EVQLVESGGGLVQPGGSLRLSCAASGFTFSDSWIHWVRQAPGKGLEWVAWISPYGGSTYYADSVKGRFTISA |
| | DTSKNTAYLQMNSLRAEDTAVYYCARRHWPGGFDYWGQGTLVTVSSASTK (SEQ ID NO: 735) |
| VH | EVQLVESGGGLVQPGGSLRLSCAASGFTFSDSWIHWVRQAPGKGLEWVAWISPYGGSTYYADSVKGRFTISA |
| | DTSKNTAYLQMNSLRAEDTAVYYCARRHWPGGFDYWGQGTLVTVSS (SEQ ID NO: 736) |
| HC | EVQLVESGGGLVQPGGSLRLSCAASGFTFSDSWIHWVRQAPGKGLEWVAWISPYGGSTYYADSVKGRFTISA |
| | DTSKNTAYLQMNSLRAEDTAVYYCARRHWPGGFDYWGQGTLVTVSSASTKGPSVFPLAPSSKSTSGGTAALG |
| | CLVKDYFPEPVTVSWNSGALTSGVHTFPAVLQSSGLYSLSSVVTVPSSSLGTQTYICNVNHKPSNTKVDKKV |
| | EPKSCDKTHTCPPCPAPELLGGPSVFLFPPKPKDTLMISRTPEVTCVVVDVSHEDPEVKFNWYVDGVEVHNA |
| | KTKPREEQYASTYRVVSVLTVLHQDWLNGKEYKCKVSNKALPAPIEKTISKAKGQPREPQVYTLPPSREEMT |
| | KNQVSLTCLVKGFYPSDIAVEWESNGQPENNYKTTPPVLDSDGSFFLYSKLTVDKSRWQQGNVFSCSVMHEA |
| | LHNHYTQKSLSLSPG (SEQ ID NO: 737) |
| VL | DIQMTQSPSSLSASVGDRVTITCRASQDVSTAVAWYQQKPGKAPKLLIYSASFLYSGVPSRFSGSGSGTDFT |
| | LTISSLQPEDFATYYCQQYLYHPATFGQGTKVEIKR (SEQ ID NO: 268) |
| LC | DIQMTQSPSSLSASVGDRVTITCRASQDVSTAVAWYQQKPGKAPKLLIYSASFLYSGVPSRFSGSGSGTDFT |
| | LTISSLQPEDFATYYCQQYLYHPATFGQGTKVEIKRTVAAPSVFIFPPSDEQLKSGTASVVCLLNNFYPREA |
| | KVQWKVDNALQSGNSQESVTEQDSKDSTYSLSSTLTLSKADYEKHKVYACEVTHQGLSSPVTKSFNRGEC |
| | (SEQ ID NO: 738) |

Group L

| | |
|---|---|
| VH | EVQLVESGGGLVQPGGSLRLSCAASGFTFSRFWMSWVRQAPGKGLEWVANINQDGTEKYYVDSVKGRFTISR |
| | DNAKNSLYLQMNSLRAGDTAVYYCANTYYDFWSGHFDYWGQGTLVTVSS (SEQ ID NO: 739) |
| VH | QEHLVESGGGVVQPGRSLRLSCEASGFTFSNFGMHWVRQAPGKGLEWVAALWSDGSNKYYADSVKGRVTISR |
| | DNSKNTLYLQMNSLRAEDTAVYYCARGRGAPGIPIFGYWGQGTLVTVSS (SEQ ID NO: 740) |
| VH | EVQLVESGGGLVKPGGSLRLSCAASGFTFSNAWMSWVRQAPGKGLEWVGRIKRKTDGGTTDYAAPVKGRFTI |
| | SRDDSKNTLHLQMNSLKTEDTAVYYCTTDDIVVVPAVMREYYFGMDVWGQGTTVTVSS (SEQ ID |
| | NO: 741) |
| VH | QVQLVQSGAEVKKPGASVQVSCKASGYSFTGYYIHWVRQAPGQGLEWMGWINPNSGTKKYAHKFQGRVTMTR |
| | DTSIDTAYMILSSLISDDTAVYYCARDEDWNFGSWFDSWGQGTLVTVSS (SEQ ID NO: 742) |
| VH | QVHLVQSGAEVKKPGASVKVSCKASGYTFTGYYIHWVRQAPGHGLEWMGWLNPNTGTTKYIQNFQGRVTMTR |
| | DTSSSTAYMELTRLRSDDTAVYYCARDEDWNYGSWFDTWGQGTLVTVSS (SEQ ID NO: 743) |
| VH | EVQLVESGGGVVRPGGSLRLSCAASGFTFDDYGMTWVRQAPGRGLEWVSGIHWHGKRTGYADSVKGRFTISR |
| | DNAKKSLYLQMNSLKGEDTALYHCVRGGMSTGDWFDPWGQGTLVIVSS (SEQ ID NO: 744) |
| VH | EVQLVESGGGVVRPGGSLRLSCAASGFTFDDYGMTWVRQVPGKGLEWVSGIHWSGRSTGYADSVKGRFTISR |
| | DNAKNSLYLQMNSLRAEDTALYYCARGGMSTGDWFDPWGQGTLVTVSS (SEQ ID NO: 745) |
| VH | EVQLVESGGGLVQPGGSLRLSCAASGFTVGSNYMNWVRQAPGKGLEWVSVIYSGGSTYYADSVKGRFTISRL |
| | TSKNTLYLQMSSLRPEDTAVYYCARGIRGLDVWGQGTTVTVSS (SEQ ID NO: 746) |
| VH | EERLVESGGDLVQPGGSLRLSCAASGITVGTNYMNWVKQAPGKGLEWVSVISSGGNTHYADSVKGRFIMSRQ |
| | TSKNTLYLQMNSLETEDTAVYYCARGIRGLDVWGQGTMVTVSS (SEQ ID NO: 747) |
| VH | QVQLVQSGAEVKMPGSSVRVSCKASGGIFSSSTISWVRQAPGQGLEWMGEIIPVFGTVNYAQKFQDRVIFTA |
| | DESTTTAYMELSSLKSGDTAVYFCARNWGLGSFYIWGQGTMVTVSS (SEQ ID NO: 748) |
| VH | EVQLVESGGDLVHPGRSLRLSCAASGFPFDEYAMHWVRQVPGKGLEWVSGISWSNNNIGYADSVKGRFTISR |
| | DNAKNSLYLQMNSLRPEDTAFYYCAKSGIFDSWGQGTLVTVSS (SEQ ID NO: 749) |
| VH | EVQLVESGGGVVQPGRSLRLSCAASGFTFSSYGMHWVRQAPGKGLEWVTLISYEGRNKYYADSVKGRFTISR |
| | DNSKNTLYLQMNSLRAEDTAVYYCAKDRTLYGMDVWGQGTTVTVSS (SEQ ID NO: 750) |
| VH | QVTLRESGPALVKTTQTLTLTCTFSGFSLSTNRMCVTWIRQPPGKALEWLARIDWDGVKYYNTSLKTRLTIS |
| | KDTSKNQVVLTMTNMDPVDTATFYCARSTSLTFYYFDYWGQGTLVTVSS (SEQ ID NO: 751) |
| VH | EVQLVESGGGLVQPGGSLRLSCAASEFTVGTNHMNWVRQAPGKGLEWVSVIYSGGNTFYADSVKGRFTISRH |
| | TSKNTLYLQMNSLTAEDTAVYYCARGLGGMDVWGQGTTVTVSS (SEQ ID NO: 752) |
| VH | EVQLVESGGGLVQRGESLRLYCAASGFTFSKYWMNWVRQAPGKGLEWVANIKGDGSEKYYVDSVKGRFTISR |
| | DNAKNSLYLQMNSLRAEDTAVYYCARDYWGSGYYFDFWGQGTLVTVSS (SEQ ID NO: 753) |
| VH | EVQLVESGGGLVQSGGSLRLSCAASGFTFSSYWMSWVRQAPGKGLEWVANIKQDGSEKYYVDSVKGRFTISR |
| | DNAKNSLYLQMNSLRADDTAVYYCARDDIVVVPAPMGYYYYYFGMDVWGQGTTVTVSS (SEQ ID |
| | NO: 754) |
| VH | EVQLVESGGGLVQPGRSLRLSCAASGFTFDDFAMHWVRQAPGKGLEWVSGISWTGGNMDYANSVKGRFTISR |
| | EDAKNSLYLQMNSLRAADTALYYCVKDIRGIVATGGAFDIWGRGTMVTVSS (SEQ ID NO: 755) |
| VH | EVQLVESGGGLVQPGGSLRLSCAASGFTVGTNYMNWVRQAPGKGLEWISVIYSGGSTFYADSVKGRFTISRQ |
| | TSQNTLYLQMNSLRPEDTAVYYCARGIRGFDIWGQGTMVTVSS (SEQ ID NO: 756) |
| VH | EVQLVESGGGLVQPGGSLRLSCAASGFTISTNYMNWVKQAPGKGLEWVAVIYSSGSTYYIDSVKGRFTISRL |
| | TSKNTVYLQMSSLNSEDTAVYYCARGIRGFDIWGQGTMVTVSS (SEQ ID NO: 757) |
| VH | EVQLVESGGGLVQPGRSLRLSCAASGFTIDDSAMHWVRQTPGKGLEWVSGISWKSGSIGYADSVRGRFTISR |
| | DNAKNSLYLQMNSLRVEDTALYYCVKDIRGNWNYGGNWFDPWGQGTLVTVSS (SEQ ID NO: 758) |
| VH | EVQLVESGGGLVQPGGSLRLSCEASGFTVGVNHMNWVRQAPGKGLEWVSVIFSSGRTFYGDYVKGRLTIFRQ |
| | TSQNTVYLQMNSLRSEDTAIYYCARGIGGLDIWGRGTMVTVSS (SEQ ID NO: 759) |
| VH | EVQLVESGGGLVQPGRSLRLSCAASGFTFDDYALHWVRQAPGKGLEWVSGISWTGGTIDYADSVKGRFTISR |
| | DNAKNSLYLQMSSLRTEDTAIYYCTRDIRGNWKYGGWFDPWGQGTLVTVSS (SEQ ID NO: 760) |
| VH | QVQLVQSGTEVKKPGASVKVSCKASGYTFTAYYMHWVRQAPGQGLDWMGWISPNSGFTNYAQKFQGRVTMTR |
| | DTSINTFYMELSGLRSDDTAVYYCAREGSTHHNSFDPWGQGTLVTVSS (SEQ ID NO: 761) |
| VH | EVQLVESGGGLVQPGGSLRLSCAASGFTVGTNFMNWVRQAPGKGLEWVSAIYSGGTANYADSVKGRFTISRD |
| | TSRNTLYLQMNSLRTEDTAVYYCARGGGMDVWGQGTTVTVSS (SEQ ID NO: 762) |
| VH | QVQLVQSGAEVKKPGSSVKVSCKASGGTFNTYVLSWVRQAPGQGLEWMGEIIPILGAANYAQNFQGRVTFTT |
| | DESTNTAYMDLSSLRSEDTAVYYCARDRTSGGFDPWGQGTLVTVSS (SEQ ID NO: 763) |
| VH | QVQLVQSGAEVEKPGASVKVSCKASGYIFTHYGISWVRQAPGQGLEWVGWISPYNGYTDYAQKLQGRVTLTT |
| | DTSTTTAYMELRNLRSDDTAMYYCSRGRGPYWSFDLWGRGTLVTVSS (SEQ ID NO: 764) |
| VL | DIQMTQSPSTLSASVGDRVTITCRASQSISNWLAWYQQKPGKAPKLLIYKASSLESGVPSRFSGSGSGTEFT |
| | LTISSLQPDDFATYYCQQYHSYSYTFGQGTKEIK (SEQ ID NO: 765) |
| VL | DIQMTQSPSSLSASVGDRVTITCRASQGIRNDLGWYQQKPGKAPKRLIYTASSLQSGVPSRFSGSGSGTEFT |
| | LTISSLQPEDFATYYCLQHNSYPLTFGGGTKVAIK (SEQ ID NO: 766) |
| VL | DIQMTQSPSSLSASVGDRVTITCRTSQGIRNDLGWYQQKPGKAPKRLIYAASSLQSGVPSRFSGSGSGTEFT |
| | LTISSLQPEDFATYYCLQHNNYPYTFGQGTKLEIK (SEQ ID NO: 767) |
| VL | DIVMTQTPLSSPVTLGQPASISCRSSQTLVHGDGNTYLSWIQQRPGQPPRLLIYKVSNQFSGVPDRFSGSGA |
| | GTDFTLKISRVEAEDVGLYFCMQATHFPITFGQGTRLEIK (SEQ ID NO: 768) |
| VL | DIVMTQTPLSSPVTLGQPASISCRSSPSLVHSDGNTYLSWLQQRPGQPPRLLIYKISNRFSGVPDRFSGSGA |
| | GTDFTLKISRVEAEDVGVYYCMQATHFPITFGQGTRLEIR (SEQ ID NO: 769) |
| VL | DIQMTQSPSSLSASLGDRVTITCRASQSINSYLNWYQQKPGKAPKLLIYVASSLQSGVPSRFSGSGSGTEFT |
| | LTISNLQPEDFATYYCQQSYSTPPITFGQGTRLEIK (SEQ ID NO: 770) |
| VL | DIQMTQSPSSLSASVGDRVTITCRASQSISSYLNWYQQKPGKAPKLLIYVASSLQSGVPSRFSGSGSGTDFT |
| | LTISSLQPEDFATYYCQQSYSTPPITFGQGTRLEIK (SEQ ID NO: 771) |
| VL | DIQMTQSPSSLSASVGDRVTITCRASQTINIYLNWYQQKPGRAPRLLIYAASSLQSGVPSRFSGSGSGTDFT |
| | LTISSLQPEDFATYYCHQSYSTPPITFGQGTRLEIK (SEQ ID NO: 772) |
| VL | DIQMTQSPSSLSASVGDRVTITCRASQSMSSYLNWYQQKPGRAPKLLIFAASSLQSGVPSRFSGSGSGTDFT |
| | LTISSLQPEDFATYYCQQSYSTPPITFGQGTRLEIK (SEQ ID NO: 773) |
| VL | EIVLTQSPGTLSLSPGERATLSCRASQSFNFNYLAWYQQKPGQAPRLLIYGASSRATGIPDRFSGSGSGTDF |
| | TLTINRLEPEDFGVFYCQQYESAPWTFGQGTKVEIK (SEQ ID NO: 774) |
| VL | DIQMTQSPSSLSASVGDRVTITCRASQSISSYLNWYQQKPGKLLIYAASSLQSGVPSRFSGGGSGTDFTLTI |
| | SSLRPEDFATYYCQQSYCTPPITFGQGTRLEIK (SEQ ID NO: 775) |
| VL | DIQMTQSPSSLSASVGDRVTITCRASQSISSYLNWYQQKPGKAPKLLIYAASSLQSGVPSRFSGSGSGTDFT |
| | LTISSLQPEDFATYYCQQSYSTPPITFGQGTRLEIK (SEQ ID NO: 776) |
| VL | DRVTITCRASQVISNYLAWYQQKPGKVPRLLIYAASTLQSGVPSRFSGSGSGTDFTLTISSLQPEDVATYYC |
| | QKYNSAPRTFGQGTKVEIK (SEQ ID NO: 777) |
| VL | DIQMTQSPSSLSASVGDRVTITCRASQNINNYLNWYQQKPGKAPKLLIYAASSFQNAVPSRFSGSGSGTDFT |
| | LTISSLQPEDFATYYCQQSYNTPLTFGGGTKVEIK (SEQ ID NO: 778) |
| VL | DIQMTQSPSSLSASVGDRVTITCRASQGIRNDLGWYQQKPGKAPKRLIYAASSLQSGVPSRFSGSGSGTEFT |
| | LTISSLQPEDFATYYCLQHNSYPYTFGQGTKLEIK (SEQ ID NO: 779) |
| VL | DIQMTQSPSSLSASVGDRVTITCRASQSISSYLNWYQQKPGKAPKLLIYAASSLQSGVPSRFSGSGSGTDFT |
| | LTISSLQPEDFATYYCQQSYSTPPITFGQGTRLEIK (SEQ ID NO: 780) |

Group M

| | |
|---|---|
| VH | QSLEESGGRLVKPDETLTITCTVSGIDLSSNGLTWVRQAPGEGLSWIGTINKDASAYYASWAKGRLTISKPS |
| | STKVDLKITSPTTEDTATYFCGRIAFKTGTSIWGPGTLVTVSS (SEQ ID NO: 1108) |
| VL | AIVMTQTPSPVSAAVGGTVTINCQASESVYSNNYLSWFQQKPGQPPKLLIYLASTLASGVPSRFKGSGSGTQ |
| | FTLTISGVQCDDAATYYCIGGKSSSTDGNAFGGGTEVVVR (SEQ ID NO: 1109) |

Group N

| | |
|---|---|
| VH | QMQLVQSGAEVKKPGSSVKVSCKASGGTFSSYAISWVRQAPGQGLEWMGGIIPIFGTANYAQKFQGRVTITA |
| | DESTSTAYMELSSLRSEDTAVYYCARGNIVATITPLDYWGQGTLVTVSS (SEQ ID NO: 1110) |
| VH | QPVLTQPPSVSAAPGQKVTISCSGSSSNIANNYVSWYQQLPGTAPKLLIFANNKRPSGIPDRFSGSKSGTSA |
| | ALDITGLQTGDEADYYCGTWDSDLRAGVFGGGTKLTVL (SEQ ID NO: 1111) |
| VH | EVQLVQSGAEVKKPGSSVKVSCKASGGTFSSYAISWVRQAPGQGLEWMGGIIPIFGTANYAQKFQGRVTITA |
| | DKSTSTAYMELSSLRSEDTAVYYCAREGTIYDSSGYSFDYWGQGTLVTVSS (SEQ ID NO: 1112) |
| VH | QVQLVESGGGVVQPGRSLRLSCAASGFTFSSYAMHWVRQAPGKGLEWVAVISFDGSNKYYADSVRGRFTISR |
| | DNSKNTLYLQMNSLRTEDTAVYYCARGWLDRDIDYWGQGTLVTVSS (SEQ ID NO: 1113) |
| VH | EVQLVESGGGVVQPGRSLRLSCAASGFTFSSYAMHWVRQAPGKGLEWVAVISFDGSNKYYADSVRGRFTISR |
| | DNSKNTLYLQMNSLRTEDTAVYYCARGWLDRDIDYWGQGTLVTVSS (SEQ ID NO: 1114) |
| VH | QVQLVESGGGVVQPGRSLRLSCAASGFTFSSYAMHWVRQAPGKGLEWVAVISFDGSNKYYADSVRGRFTISR |
| | DNSKNTLYLQMNSLRTEDTAVYYCARGWLDRDIDYWGQGTLVTVSS (SEQ ID NO: 1115) |
| VH | EVQLVESGGGVVQPGRSLRLSCAASGFTFSSYAMHWVRQAPGKGLEWVAVISFDGSNKYYADSVRGRFTISR |
| | DNSKNTLYLQMNSLRTEDTAVYYCARGWLDRDIDYWGQGTLVTVSS (SEQ ID NO: 1116) |
| VH | EVQLVESGGGVVQPGRSLRLSCAASGFTFSSYAMHWVRQAPGKGLEWVAVISFDGSNKYYADSVRGRFTISR |
| | DNSKNTLYLQMNSLRTEDTAVYYCARGWLDRDIDYWGQGTLVTVSS (SEQ ID NO: 1117) |
| VH | QVQLVESGGGVVQPGRSLRLSCAASGFTFSSYAMHWVRQAPGKGLEWVAVISFDGSNKYYADSVRGRFTISR |
| | DNSKNTLYLQMNSLRTEDTAVYYCARGWLDRDIDYWGQGTLVTVSS (SEQ ID NO: 1118) |
| VH | QVQLVQSGAEVKKPGSSVKVSCKASGGTFSRYGVHWVRQAPGQGLEWMGRLIPIVSMTNYAQKFQDRVSITT |
| | DKSTGTAYMELRSLTSEDTALYYCASVGQQLPWVFFAWGQGTLVTVSS (SEQ ID NO: 1119) |
| VH | QMQLVQSGGGVVQPGRSLRLSCAASGFTFSSYAMHWVRQAPGKGLEWVAVISFDGSNKYYADSVRGRFTISR |
| | DNSKNTLYLQMNSLRTEDTAVYYCARGWLDRDIDYWGQGTLVTVSS (SEQ ID NO: 1120) |
| VH | QVQLVQSGGGVVQPGRSLRLSCAASGFTFSSYAMHWVRQAPGKGLEWVAVISFDGSNKYYADSVRGRFTISR |
| | DNSKNTLYLQMNSLRTEDTAVYYCARGWLDRDIDYWGQGTLVTVSS (SEQ ID NO: 1121) |
| VH | QMQLVQSGAEVKKPGSSVKVSCKASGGTFSSYAYSWVRQAPGQGLEWMGGIIPSFGTANYAQKFQGRVTITA |
| | DESTSTAYMELSSLRSEDTAVYYCARGPIVATITPLDYWGQGTLVTVSS (SEQ ID NO: 1122) |
| VH | QMQLVQSGAEVKKPGSSVKVSCKASGGTFSSYAYSWVRQAPGQGLEWMGGIIPIFGTANYAQKFQGRVTITA |
| | DESTSTAYMELSSLRSEDTAVYYCARGPIVATITPLDYWGQGTLVTVSS (SEQ ID NO: 1123) |
| VH | QMQLVQSGAEVKKPGSSVKVSCKASGGTFSSYAYSWVRQAPGQGLEWMGGIIPSFGTANYAQKFQGRVTITA |
| | DESTSTAYMELSSLRSEDTAVYYCARGPIVATITPLDYWGQGTLVTVSS (SEQ ID NO: 1124) |
| VH | QMQLVQSGAEVKKPGSSVKVSCKASGGTFSSYAISWVRQAPGQGLEWMGGIIPAFGTANYAQKFQGRVTITA |
| | DESTSTAYMELSSLRSEDTAVYYCARGPIVATITPLDYWGQGTLVTVSS (SEQ ID NO: 1125) |
| VL | SYELMQPPSVSVAPGKTATIACGGENIGRKTVHWYQQKPGQAPVLVIYYDSDRPSGIPERFSGSNSGNTATL |
| | TISRVEAGDEADYYCQVWDSSSDHRIFGGGTKLTVL (SEQ ID NO: 1126) |
| VL | AIRMTQSPSSLSASVGDRVTITCRASQSISSYLNWYQQKPGKAPKLLIYTTSSLKSGVPSRFSGSGSGTDFT |
| | LTISRLQPEDFATYYCQQSYSSTWTFGRGTKVEIK (SEQ ID NO: 1127) |
| VL | QSVLTQPPSVSAAPGQKVTISCSGNNSNIANNYVSWYQQLPGTAPKLLIYDNNYRPSGIPDRFSGSKSGTSA |
| | TLDITGLQTGDEADYYCGVWDGSLTTGVFGGGTKLTVL (SEQ ID NO: 1128) |
| VL | LPVLTQPASVSGSPGQSITISCTGTTSDIGGYDYVSWYQQHPGKAPKLMIYDVSKRPSGVSNRFSGSKSGNT |
| | ASLTISGLQAEDEADYYCSSYTSSSTHVFGTGTKLTVL (SEQ ID NO: 1129) |
| VL | QSALTQPASVSGSPGQSITISCTGTSSDVGGYNYVSWYQQHPGKAPKLMIYDVSNRPSGVSNRFSGSKSGNT |
| | ASLTISGLQAEDEADYYCSSYRSSTLGPVFGGGTKLTVL (SEQ ID NO: 1130) |
| VL | QAGLTQPPSVSEAPRQRVTISCSGSSSNIGNNAVNWYQQLPGKAPKLLIYYDDLLPSGVSDRFSGSKSGTSA |
| | SLAISGLQSEDEADYYCAAWDDSLNGYVFGTGTKLTVL (SEQ ID NO: 1131) |
| VL | QSALTQPRSVSGSPGQSVTISCTGTSSDVGGYNYVSWYQQHPGKAPKLMIYDVSKRPSGVPDRFSGSKSGNT |
| | ASLTISGLQAEDEADYYCSSYTSSTTHVFGTGTKVTVL (SEQ ID NO: 1132) |
| VL | QSVVTQPPSVSAAPGQKVTISCSGSSSNIGNNYVSWYQQLPGTAPKLLIYDNNKRPSGIPDRFSGSKSGTSA |
| | TLGITGLQTGDEADYYCGTWDSSLSVWVFGGGTQLTVL (SEQ ID NO: 1133) |
| VL | QSVLTQPASVSGSPGQSITISCTGTSSDVGGYNYVSWYQQHPGRAPRLMIYDVSNRPSGVSNRFSGSKSGNT |
| | ASLTISGLQAEDEGDYYCSSYTSGGTLGPVFGGGTKLTVL (SEQ ID NO: 1134) |
| VL | QSVVTQPPSVSAAPGQKVTISCSGSSSNIGNNYVSWYQQLPGTAPKLLIYDNNKRPSGIPDRFSGSKSGTSA |
| | TLGITGLQTGDEADYYCGTWDSSLSAVVFGGGTKLTVL (SEQ ID NO: 1135) |
| VL | QSVVTQPPSVSAAPGQKVTISCSGSSSNIGNNYVSWYQQVPGTAPKLLIYDNNKRPSGIPDRFSGSNSDTSA |
| | TLGITGLQTGDEADYYCGTWDSSLSAWVFGGGTKLTVL (SEQ ID NO: 1136) |
| VL | QSVVTQPPSVSAAPGQKVTISCSGSSSNIGNNYVSWYQQLPGTAPKLLIYDNNKRPSGIPDRFSGSKSGTSA |
| | TLGITGLQTGDEADYYCGTWDSSLSAGSVVFGGGTKLTVL (SEQ ID NO: 1137) |
| VL | SYELMQPPSVSVAPGKTATIACGGENIGRKTVHWYQQKPGQAPVLVIYYDSDRPSGIPERFSGSNSGNTATL |
| | TISRVEAGDEADYYCLVWDSSSDHRIFGGGTKLTVL (SEQ ID NO: 1138) |
| VL | SYELMQPPSVSVAPGKTATIACGGENIGRKTVHWYQQKPGQAPVLVIYYDSDRPSGIPERFSGSNSGNTATL |
| | TISRVEAGDEADYYCQVWDSSSDHRIFGGGTKLTVL (SEQ ID NO: 1139) |
| VL | SYELMQPPSVSVAPGKTATIACGGENIGRKTVHWYQQKPGQAPVLVIYYDSDRPSGIPERFSGSNSGNTATL |
| | TISRVEAGDEADYYCQVWDSSSDHRIFGGGTKLTVL (SEQ ID NO: 1140) |
| VL | SYELMQPPSVSVAPGKTATIACGGENIGRKTVHWYQQKPGOAPVLVIYYDSDRPSGIPERFSGSNSGNTATL |
| | TISRVEAGDEADYYCQVWDSSSDHRIFGGGTKLTVL (SEQ ID NO: 1141) |

Group O

| | |
|---|---|
| VH | QVQLVQSGSEVKKSGSSVKVSCKTSGGTFSITNYAINWVRQAPGQGLEWMGGILPIFGAAKYAQKFQDRVTI |
| | TADESTNTAYLELSSLTSEDTAMYYCARGKRWLQSDLQYWGQGTLVTVSS (SEQ ID NO: 1142) |
| VL | QPVLTQPASVSGSPGQSITISCTGSSSDVGSYDLVSWYQQSPGKVPKLLIYEGVKRPSGVSNRFSGSKSGNT |
| | ASLTISGLQAEDEADYYCSSYAGTRNFVFGGGTQLTVL (SEQ ID NO: 1143) |

Note that the sequences provided for Group J are heavy chain and light chain amino acid sequences; the sequences provided for Group K include variable heavy chain, variable light chain, heavy chain, and light chain amino acid sequences, all other sequences presented in Table 15 are variable heavy chain and variable light chain sequences

[0302] In some embodiments, the activatable anti-PDL1 antibody includes a heavy chain that comprises or is derived from a heavy chain amino acid sequence shown in U.S. Pat. Nos. 7,943,743; 8,779,108; 8,217,149; 8,460,927; 7,794,710; 8,741,295; and 8,981,063; in US Patent Application Publication Nos. 2014356353; 20130323249; 2014341917; 20130309250; 20110280877; and 20090317368 (now issued as U.S. Pat. No. 8,981,063 listed above); and in PCT Publication Nos. WO2014/100483; WO2012/145493; WO2014/100439; WO2014/195852; WO2014/100079; WO2013/173223; and WO2014/55897, the contents of each of which are hereby incorporated by reference in their entirety. In some embodiments, the activatable anti-PDL1 antibody includes a light chain that comprises or is derived from a light chain amino acid sequence shown in U.S. Pat. Nos. 7,943,743; 8,779,108; 8,217,149; 8,460,927; 7,794,710; 8,741,295; and 8,981,063; in US Patent Application Publication Nos. 2014356353; 20130323249; 2014341917; 20130309250; 20110280877; and 20090317368 (now issued as U.S. Pat. No. 8,981,063); and in PCT Publication Nos. WO2014/100483; WO2012/145493; WO2014/100439; WO2014/195852; WO2014/100079; WO2013/173223; and WO2014/55897, the contents of each of which are hereby incorporated by reference in their entirety. In some embodiments, the activatable anti-PDL1 antibody includes a heavy chain and a light chain that comprise or are derived from a heavy chain amino acid sequence and a light chain amino acid sequence shown in U.S. Pat. Nos. 7,943,743; 8,779,108; 8,217,149; 8,460,927; 7,794,710; 8,741,295; and 8,981,063; in US Patent Application Publication Nos. 2014356353; 20130323249; 2014341917; 20130309250; 20110280877; and 20090317368 (now issued as U.S. Pat. No. 8,981,063); and in PCT Publication Nos. WO2014/100483; WO2012/145493; WO2014/100439; WO2014/195852; WO2014/100079; WO2013/173223; and WO2014/55897, the contents of each of which are hereby incorporated by reference in their entirety.

[0303] In some embodiments, the activatable antibody includes an anti-PDL1 antibody that includes at least one CDR sequence selected from the CDR sequences (VH CDR1, VH CDR2, VH CDR3, VL CDR1, VL CDR2, VL CDR3) from the CDR sequences recited in U.S. Pat. No. 7,943,743. In some embodiments, the activatable antibody includes an anti-PDL1 antibody that includes at least one CDR, at least two, at least three, at least four, at least five, and/or six CDR sequences selected from the following sequences in U.S. Pat. No. 7,943,743; SEQ ID NO: 21, SEQ ID NO: 31, SEQ ID NO: 41, SEQ ID NO: 51, SEQ ID NO: 61, and SEQ ID NO: 71. In some embodiments, the activatable antibody includes an anti-PDL1 antibody that includes at least one CDR, at least two, at least three, at least four, at least five, and/or six CDR sequences selected from SEQ ID NO: 22, SEQ ID NO: 32, SEQ ID NO: 42, SEQ ID NO: 52, SEQ ID NO: 62, and SEQ ID NO: 72. In some embodiments, the activatable antibody includes an anti-PDL1 antibody that includes at least one CDR, at least two, at least three, at least four, at least five, and/or six CDR sequences selected from SEQ ID NO: 23, SEQ ID NO: 33, SEQ ID NO: 43, SEQ ID NO: 53, SEQ ID NO: 63, and SEQ ID NO: 73.

[0304] In some embodiments, the activatable antibody includes an anti-PDL1 antibody that includes at least one CDR, at least two, at least three, at least four, at least five, and/or six CDR sequences selected from the following sequences in U.S. Pat. No. 7,943,743; a VH CDR1 sequence comprising SEQ ID NO: 21, SEQ ID NO: 22, or SEQ ID NO: 23; a VH CDR2 sequence comprising SEQ ID NO: 31, SEQ ID NO: 32, or SEQ ID NO: 33; a VH CDR3 sequence comprising SEQ ID NO: 41, SEQ ID NO: 42, or SEQ ID NO: 43; a VL CDR1 sequence comprising SEQ ID NO: 51, SEQ ID NO: 52, or SEQ ID NO: 53; a VL CDR2 sequence comprising SEQ ID NO: 61, SEQ ID NO: 62, or SEQ ID NO: 63; and a VL CDR3 sequence comprising SEQ ID NO: 71, SEQ ID NO: 72, or SEQ ID NO: 73.

[0305] In some embodiments, the activatable antibody includes an anti-PDL1 antibody that binds a polypeptide that comprises or is derived from SEQ ID NO: 1 or SEQ ID NO: 3 of U.S. Pat. No. 8,460,927.

[0306] In some embodiments, the activatable antibody includes an anti-PDL1 antibody that binds a human PDL1 polypeptide that comprises or is derived from SEQ ID NO: 1 of U.S. Pat. No. 8,460,927:

(SEQ ID NO: 585)
MRIFAVFIFMTYWHLLNAFTVTVPKDLYVVEYGSNMTIECKFPVEKQLDL
AALIVYWEMEDKNIIQFVHGEEDLKVQHSSYRQRARLLKDQLSLGNAALQ
ITDVKLQDAGVYRCMISYGGADYKRITVKVNAPYNKINQRILVVDPVTSE
HELTCQAEGYPKAEVIWTSSDHQVLSGKTTTTNSKREEKLFNVTSTLRIN
TTTNEIFYCTFRRLDPEENHTAELVIPELPLAHPPNERTHLVILGAILLC
LGVALTFIFRLRKGRMMDVKKCGIQDTNSKKQSDTHLEET

[0307] In some embodiments, the activatable antibody includes an anti-PDL1 antibody that binds a murine PDL1 polypeptide that comprises or is derived from SEQ ID NO: 3 of U.S. Pat. No. 8,460,927:

(SEQ ID NO: 586)
MRIFAGIIFTACCHLLRAFTITAPKDLYVVEYGSNVTMECRFPVERELDL
LALVVYWEKEDEQVIQFVAGEEDLKPQHSNFRGRASLPKDQLLKGNAALQ
ITDVKLQDAGVYCCIISYGGADYKRITLKVNAPYRKINQRISVDPATSEH
ELICQAEGYPEAEVIWTNSDHQPVSGKRSVTTSRTEGMLLNVTSSLRVNA
TANDVFYCTFWRSQPGQNHTAELIIPELPATHPPQNRTHWVLLGSILLFL
IVVSTVLLFLRKQVRMLDVEKCGVEDTSSKNRNDTQFEET

[0308] In some embodiments, the activatable antibody includes an anti-PDL1 antibody that binds a polypeptide that comprises or is derived from SEQ ID NO: 36 or SEQ ID NO: 38 of PCT Publication No. WO 2014/10079.

[0309] In some embodiments, the activatable antibody includes an anti-PDL1 antibody that binds a human PDL1 polypeptide that comprises or is derived from SEQ ID NO: 36 of PCT Publication No. WO 2014/10079.

(SEQ ID NO: 587)
MRIFAVFIFMTYWHLLNAFTVTVPKDLYVVEYGSNMTIECKFPVEKQLDL
AALIVYWEMEDKNIIQFVHGEEDLKVQHSSYRQRARLLKDQLSLGNAALQ
ITDVKLQDAGVYRCMISYGGADYKRITVKVNAPYNKINQRILVVDPVTSE
HELTCQAEGYPKAEVIWTSSDHQVLSGKTTTTNSKREEKLFNVTSTLRIN
TTTNEIFYCTFRRLDPEENHTAELVIPELPLAHPPNERTHLVILGAILLC
LGVALTFIFRLRKGRMMDVKCGIQDTNSKQSDTHLEET

[0310] In some embodiments, the activatable antibody includes an anti-PDL1 antibody that binds a human PDL1 extracellular domain polypeptide that comprises or is derived from SEQ ID NO: 38 of PCT Publication No. WO 2014/10079.

(SEQ ID NO: 588)
[sequence omitted]

[0311] In some embodiments, the activatable antibody includes an anti-PDL1 antibody that is or is derived from BMS-936559 (MDX-1 105). In some embodiments, the activatable antibody includes an anti-PDL1 antibody that is or is derived from MPDL3280A (RG7446). In some embodiments, the activatable antibody includes an anti-PDL1 antibody that is or is derived from MED14736. In some embodiments, the activatable antibody includes an anti-PDL1 antibody that is or is derived from AMP224. In some embodiments, the activatable antibody includes an anti-PDL1 antibody that is or is derived from MSB0010718C.

[0312] In some embodiments, the activatable anti-PDL1 antibody comprises or is derived from an antibody that is manufactured, secreted or otherwise produced by a hybridoma, such as, for example, the hybridoma(s) disclosed in U.S. Pat. No. 8,779,108 and deposited at the National Collections of Industrial and Marine Bacteria (NCIMB) under deposit number 41598, as well as the hybridoma(s) disclosed in U.S. Pat. No. 8,741,295 and deposited at the Collection Nationale De Cultures De Microorganismes (CNCM) under deposit number I-4080, I-4081, and/or I-4122.

[0313] In some embodiments, the activatable anti-PDL1 antibody includes a CDR sequence shown in Table 16, a combination of VL CDR sequences (VL CDR1, VL CDR2, VL CDR3) selected from the group consisting of those combinations shown in a single row Table 16, a combination of VH CDR sequences (VH CDR1, VH CDR2, VH CDR3) selected from the group consisting of those combinations shown in Table 16, or a combination of VL CDR and VH CDR sequences (VL CDR1, VL CDR2, VL CDR3, VH CDR1, VH CDR2, VH CDR3) selected the group consisting of those combinations shown in Table 16.

TABLE 16
CDR Sequences for Antibodies and
Activatable Antibodies that Bind PDL1

| | VL | | | VH | | |
|---|---|---|---|---|---|---|
| | | CDR2 | CDR3 | CDR1 | | |
| AB | CDR1 | (SEQ ID | (SEQ ID | (SEQ | CDR2 | CDR3 |
| Name | (SEQ ID NO) | NO) | NO) | ID NO) | (SEQ ID NO) | (SEQ ID NO) |
| C8 | RASQSISSYLN | KASRLQS | RALKPVT | SYAMS | DITASGQRTTYADS | SKAIFDY |
| | (209) | (210) | (211) | (212) | (213) | (214) |
| C12 | RASQSISSYLN | AASSLQS | SYSTPNT | SYAMS | SINKDGHYTSYADS | NLDEFDY |
| | (209) | (215) | (216) | (212) | (217) | (218) |
| C16 | RASQSISSYLN | SASQLQS | ANSRP3T | SYAMS | SIMATGAGTLYADS | DGAGEDY |
| | (209) | (219) | (220) | (212) | (221) | (222) |
| C20 | RASQSISSYLN | NASSLQS | YPYGPG | SYAMS | TITSSGAATYYADS | NYTGFDY |
| | (209) | (223) | (224) | (212) | (225) | (226) |
| C60 | RASQSISSYLN | YASTLQS | DNGYPST | SYAMS | SIYSTGGATAYADS | SSAGFDY |
| | (209) | (227) | (228) | (212) | (229) | (230) |
| C1 | RASQSISSYLN | YASTLQS | DNGYPST | SYAMS | SSIYSTGGATAYADS | SSAGQSRPGFDY |
| | (209) | (227) | (228) | (212) | (231) | (232) |
| D1 | RASQSISSYLN | YASTLQS | DNGYPST | SYAMS | SSIYSTGGATAYADS | SSAGQSWPGFDY |
| | (209) | (227) | (228) | (212) | (231) | (233) |
| G7 | RASQSISSYLN | YASTLQS | DNGYPST | SYAMS | SSIYSTGGATAYADS | SSAGQSFPGFDY |
| | (209) | (227) | (228) | (212) | (231) | (234) |
| H9 | RASQSISSYLN | YASTLQS | DNGYPST | SYAMS | SSIYSTGGATAYADS | WSAAFDY |
| | (209) | (227) | (228) | (212) | (231) | (235) |
| B10 | RASQSISSYLN | YASTLQS | DNGYPST | SYAMS | SSIYSTGGATAYADS | WSAGYDY |
| | (209) | (227) | (228) | (212) | (231) | (236) |
| E10 | RASQSISSYLN | YASTLQS | DNGYPST | SYAMS | SSIYSTGGATAYADS | WSKGFDY |
| | (209) | (227) | (228) | (212) | (231) | (237) |
| A05 | RASQSISSYLN | YASTLQS | DNGYPST | SYAMS | SSIWKQGIVTVYDS | SSAGFDY |
| | (209) | (227) | (228) | (212) | (238) | (230) |
| C05 | RASQSISSYLN | YASTLQS | DNGYPST | SYAMS | SSIWRNGIVTVYDS | SSAGFDY |
| | (209) | (227) | (228) | (212) | (239) | (230) |
| C10 | RASQSISSYLN | YASTLQS | DNGYPST | SYAMS | SDIWKQGMVTVYDS | SSAGFDY |
| | (209) | (227) | (228) | (212) | (240) | (230) |
| D08 | RASQSISSYLN | YASTLQS | DNGYPST | SYAMS | SSIWRQGLATAYDS | SSAGFDY |
| | (209) | (227) | (228) | (212) | (241) | (230) |
| G09 | RASQSISSYLN | YASTLQS | DNGYPST | SYAMS | SEIVATGILTSYDS | SSAGFDY |
| | (209) | (227) | (228) | (212) | (242) | (230) |
| G10 | RASQSISSYLN | YASTLQS | DNGYPST | SYAMS | SSIGRQGLITVYDS | SSAGFDY |
| | (209) | (227) | (228) | (212) | (243) | (230) |
| G12 | RASQSISSYLN | YASTLQS | DNGYPST | SYAMS | SSIWYQGLVTVYDS | SSAGFDY |
| | (209) | (227) | (228) | (212) | (244) | (230) |
| E11 | RASQSISSYLN | YASTLQS | DNGYPST | SYAMS | SDIWKQGFATADS | SSAGFDY |
| | (209) | (227) | (228) | (212) | (245) | (230) |
| D01 | RASQSISSYLN | YASTLQS | DNGYPST | SYAMS | SSIWKQGIVTVYDS | SSAGFDY |
| | (209) | (227) | (228) | (212) | (238) | (230) |
| H06 | RASQSISSYLN | YASTLQS | DNGYPST | SYAMS | SSIWRQGLATAYDS | SSAGFDY |
| | (209) | (227) | (228) | (212) | (241) | (230) |
| C5H9 | RASQSISSYLN | YASTLQS | DNGYPST | SYAMS | SSIWRNGIVTVYADS | WSAAFDY |
| | (209) | (227) | (228) | (212) | (246) | (235) |
| C5B10 | RASQSISSYLN | YASTLQS | DNGYPST | SYAMS | SSIWRNGIVTVYADS | WSAGYDY |
| | (209) | (227) | (228) | (212) | (246) | (236) |
| C5E10 | RASQSISSYLN | YASTLQS | DNGYPST | SYAMS | SSIWRNGIVTVYADS | WSKGFDY |
| | (209) | (227) | (228) | (212) | (246) | (237) |
| G12H9 | RASQSISSYLN | YASTLQS | DNGYPST | SYAMS | SSIWYQGLVTVYADS | WSAAFDY |
| | (209) | (227) | (228) | (212) | (247) | (235) |
| G12B10 | RASQSISSYLN | YASTLQS | DNGYPST | SYAMS | SSIWYQGLVTVYADS | WSAGYDY |
| | (209) | (227) | (228) | (212) | (247) | (236) |
| G12E10 | RASQSISSYLN | YASTLQS | DNGYPST | SYAMS | SSIWYQGLVTVYADS | WSKGFDY |
| | (209) | (227) | (228) | (212) | (247) | (237) |
| C5H9 | RASQSISSYLN | AASSLQS | DNGYPST | SYAMS | SSIWRNGIVTVYADS | WSAAFDY |
| v2 | (209) | (215) | (228) | (212) | (246) | (235) |

[0314] In some embodiments, the activatable anti-PDL1 antibody includes a CDR sequence shown in Table 17, a combination of VL CDR sequences selected from the group consisting of those combinations shown in Table 17, and/or a combination of VH CDR sequences selected from the group consisting of those combinations shown in Table 17.

[0315] In some embodiments, the activatable anti-PDL1 antibody includes a combination of heavy chain CDR sequences selected from the group consisting of the combinations shown in Group A in Table 17. In some embodiments, the activatable anti-PDL1 antibody includes a combination of light chain CDR sequences selected from the group consisting of the combinations shown in Group A in Table 17. In some embodiments, the activatable anti-PDL1 antibody includes a combination of heavy chain CDR sequences selected from the group consisting of the combinations shown in Group A in Table 17, and a combination of light chain CDR sequences selected from the group consisting of the combinations shown in Group A in Table 17.

[0316] In some embodiments, the activatable anti-PDL1 antibody includes a combination of heavy chain CDR sequences selected from the group consisting of the combinations shown in Group B in Table 17. In some embodiments, the activatable anti-PDL1 antibody includes a combination of light chain CDR sequences selected from the group consisting of the combinations shown in Group B in Table 17. In some embodiments, the activatable anti-PDL1 antibody includes a combination of heavy chain CDR sequences selected from the group consisting of the combinations shown in Group B in Table 17, and a combination of light chain CDR sequences selected from the group consisting of the combinations shown in Group B in Table 17.

[0317] In some embodiments, the activatable anti-PDL1 antibody includes a combination of heavy chain CDR sequences selected from the group consisting of the combinations shown in Group C in Table 17. In some embodiments, the activatable anti-PDL1 antibody includes a combination of light chain CDR sequences selected from the group consisting of the combinations shown in Group C in Table 17. In some embodiments, the activatable anti-PDL1 antibody includes a combination of heavy chain CDR sequences selected from the group consisting of the combinations shown in Group C in Table 17, and a combination of light chain CDR sequences selected from the group consisting of the combinations shown in Group C in Table 17.

[0318] In some embodiments, the activatable anti-PDL1 antibody includes a combination of heavy chain CDR sequences selected from the group consisting of the combinations shown in Group D in Table 17. In some embodiments, the activatable anti-PDL1 antibody includes a combination of light chain CDR sequences selected from the group consisting of the combinations shown in Group D in Table 17. In some embodiments, the activatable anti-PDL1 antibody includes a combination of heavy chain CDR sequences selected from the group consisting of the combinations shown in Group D in Table 17, and a combination of light chain CDR sequences selected from the group consisting of the combinations shown in Group D in Table 17.

[0319] In some embodiments, the activatable anti-PDL1 antibody includes a combination of heavy chain CDR sequences selected from the group consisting of the combinations shown in Group E in Table 17. In some embodiments, the activatable anti-PDL1 antibody includes a combination of light chain CDR sequences selected from the group consisting of the combinations shown in Group E in Table 17. In some embodiments, the activatable anti-PDL1 antibody includes a combination of heavy chain CDR sequences selected from the group consisting of the combinations shown in Group E in Table 17, and a combination of light chain CDR sequences selected from the group consisting of the combinations shown in Group E in Table 17.

[0320] In some embodiments, the activatable anti-PDL1 antibody includes a combination of heavy chain CDR sequences selected from the group consisting of the combinations shown in Group F in Table 17. In some embodiments, the activatable anti-PDL1 antibody includes a combination of light chain CDR sequences selected from the group consisting of the combinations shown in Group F in Table 17. In some embodiments, the activatable anti-PDL1 antibody includes a combination of heavy chain CDR sequences selected from the group consisting of the combinations shown in Group F in Table 17, and a combination of light chain CDR sequences selected from the group consisting of the combinations shown in Group F in Table 17.

[0321] In some embodiments, the activatable anti-PDL1 antibody includes a combination of heavy chain CDR sequences selected from the group consisting of the combinations shown in Group G in Table 17. In some embodiments, the activatable anti-PDL1 antibody includes a combination of light chain CDR sequences selected from the group consisting of the combinations shown in Group G in Table 17. In some embodiments, the activatable anti-PDL1 antibody includes a combination of heavy chain CDR sequences selected from the group consisting of the combinations shown in Group G in Table 17, and a combination of light chain CDR sequences selected from the group consisting of the combinations shown in Group G in Table 17.

[0322] In some embodiments, the activatable anti-PDL1 antibody includes a combination of heavy chain CDR sequences selected from the group consisting of the combinations shown in Group H in Table 17. In some embodiments, the activatable anti-PDL1 antibody includes a combination of light chain CDR sequences selected from the group consisting of the combinations shown in Group H in Table 17. In some embodiments, the activatable anti-PDL1 antibody includes a combination of heavy chain CDR sequences selected from the group consisting of the combinations shown in Group H in Table 17, and a combination of light chain CDR sequences selected from the group consisting of the combinations shown in Group H in Table 17.

[0323] In some embodiments, the activatable anti-PDL1 antibody includes a combination of heavy chain CDR sequences selected from the group consisting of the combinations shown in Group I in Table 17. In some embodiments, the activatable anti-PDL1 antibody includes a combination of light chain CDR sequences selected from the group consisting of the combinations shown in Group I in Table 17. In some embodiments, the activatable anti-PDL1 antibody includes a combination of heavy chain CDR sequences selected from the group consisting of the combinations shown in Group I in Table 17, and a combination of light chain CDR sequences selected from the group consisting of the combinations shown in Group I in Table 17.

[0324] In some embodiments, the activatable anti-PDL1 antibody includes a combination of heavy chain CDR sequences selected from the group consisting of the combinations shown in Group J in Table 17. In some embodiments, the activatable anti-PDL1 antibody includes a combination of light chain CDR sequences selected from the group consisting of the combinations shown in Group J in Table 17. In some embodiments, the activatable anti-PDL1 antibody includes a combination of heavy chain CDR sequences selected from the group consisting of the combinations shown in Group J in Table 17, and a combination of light chain CDR sequences selected from the group consisting of the combinations shown in Group J in Table 17.

[0325] In some embodiments, the activatable anti-PDL1 antibody includes a combination of heavy chain CDR sequences selected from the group consisting of the combinations shown in Group K in Table 17. In some embodiments, the activatable anti-PDL1 antibody includes a combination of light chain CDR sequences selected from the group consisting of the combinations shown in Group K in Table 17. In some embodiments, the activatable anti-PDL1 antibody includes a combination of heavy chain CDR sequences selected from the group consisting of the combinations shown in Group K in Table 17, and a combination of light chain CDR sequences selected from the group consisting of the combinations shown in Group K in Table 17.

[0326] In some embodiments, the activatable anti-PDL1 antibody includes a combination of heavy chain CDR sequences selected from the group consisting of the combinations shown in Group L in Table 17. In some embodiments, the activatable anti-PDL1 antibody includes a combination of light chain CDR sequences selected from the group consisting of the combinations shown in Group L in Table 17. In some embodiments, the activatable anti-PDL1 antibody includes a combination of heavy chain CDR sequences selected from the group consisting of the combinations shown in Group L in Table 17, and a combination of light chain CDR sequences selected from the group consisting of the combinations shown in Group L in Table 17.

[0327] In some embodiments, the activatable anti-PDL1 antibody includes a combination of heavy chain CDR sequences selected from the group consisting of the combinations shown in Group M in Table 17. In some embodiments, the activatable anti-PDL1 antibody includes a combination of light chain CDR sequences selected from the group consisting of the combinations shown in Group M in Table 17. In some embodiments, the activatable anti-PDL1 antibody includes a combination of heavy chain CDR sequences selected from the group consisting of the combinations shown in Group M in Table 17, and a combination of light chain CDR sequences selected from the group consisting of the combinations shown in Group M in Table 17.

[0328] In some embodiments, the activatable anti-PDL1 antibody includes a combination of heavy chain CDR sequences selected from the group consisting of the combinations shown in Group N in Table 17. In some embodiments, the activatable anti-PDL1 antibody includes a combination of light chain CDR sequences selected from the group consisting of the combinations shown in Group N in Table 17. In some embodiments, the activatable anti-PDL1 antibody includes a combination of heavy chain CDR sequences selected from the group consisting of the combinations shown in Group N in Table 17, and a combination of light chain CDR sequences selected from the group consisting of the combinations shown in Group N in Table 17.

[0329] In some embodiments, the activatable anti-PDL1 antibody includes a combination of heavy chain CDR sequences selected from the group consisting of the combinations shown in Group O in Table 17. In some embodiments, the activatable anti-PDL1 antibody includes a combination of light chain CDR sequences selected from the group consisting of the combinations shown in Group O in Table 17. In some embodiments, the activatable anti-PDL1 antibody includes a combination of heavy chain CDR sequences selected from the group consisting of the combinations shown in Group O in Table 17, and a combination of light chain CDR sequences selected from the group consisting of the combinations shown in Group O in Table 17.

[0330] In some embodiments, the activatable anti-PDL1 antibody includes a heavy chain CDR1 sequence selected from the group consisting of the sequences shown in Group P in Table 17.

TABLE 17
Additional CDR Sequences for Antibodies and
Activatable Antibodies that Bind PDL1

| VL | | | VH | | |
|---|---|---|---|---|---|
| CDR1 | CDR2 | CDR3 | CDR1 | CDR2 | CDR3 |
| (SEQ ID NO:) | (SEQ ID NO:) | (SEQ ID NO:) | (SEQ ID NO:) | (SEQ ID NO:) | (SEQ ID NO:) |

Group A

| | | | | | |
|---|---|---|---|---|---|
| RASQSVSSYLV | DASNRAT | QQRSNWPRT | DYGFS | WITAYNGNTNYAQKLQG | DYFYGMDV |
| (304) | (293) | (278) | (296) | (284) | (269) |
| RASQSVSSYLA | AASSLQS | QQRSNWPT | TYAIS | GIIPIFGKAHYAQKFQG | KFHFVSGSPFGMDV |
| (305) | (215) | (279) | (297) | (285) | (270) |
| RASQGISSWLA | GASSRAT | QQYNSYPYT | SYDVH | WLHADTGITKFSQKFQG | ERIQLWFDY |
| (306) | (294) | (280) | (298) | (286) | (271) |
| RASQSVSSSYLA | DASSLES | QQYGSSPWT | TYAIN | GIIPIFGTANHAQKFQG | DQGIAAALFDY |
| (307) | (295) | (281) | (299) | (287) | (272) |
| RASQGISSALA | KASTLES | QQYGSSP | DYVVH | GISGNSGNIGYADSVKG | PFDY |
| (308) | (447) | (282) | (300) | (288) | (273) |
| | | QQFNSYPET | SYAIS | GIIPIFGRAHYAQKFQG | KYDYVSGSPFGMDV |
| | | (283) | (301) | (289) | (274) |
| | | QQSYSTPWT | SYAIN | GIIPIFGSANYAQKFQD | DSSGWSRYYMDV |
| | | (448) | (302) | (290) | (275) |
| | | | DYGMH | GIIPLFGIAHYAQKFQG | KYSYVSGSPFGMDV |
| | | | (303) | (291) | (276) |
| | | | | GISWNRGRIEYADSVKG | GRFRYFDWFLDY |
| | | | | (292) | (277) |
| | | | | | DYFWSGFSAFDI |
| | | | | | (446) |

Group B

| | | | | | |
|---|---|---|---|---|---|
| SGDALPQKYVF | EDSKRPS | YSTDRSGNHRV | TYSMN | SISSSGDYIYYADSVK | DLVTSMVAFDY |
| (312) | (313) | (314) | (309) | (310) | (311) |
| RASQRVSSSYLA | DASSRAT | QQYGSLPWT | RYWMS | NIKQDGSEKYYVDSVKG | EGGWFGELAFDY |
| (318) | (319) | (320) | (315) | (316) | (317) |
| RASQSVSSNYLA | GTSSRAT | QQYGSSIFT | SYWMS | NIKQDGGEQYYVDSVK | DWNYGYYDMDV |
| (324) | (325) | (326) | (321) | (322) | (323) |

Group C

| | | | | | |
|---|---|---|---|---|---|
| RASQ(D/V) | SAS(F/T) | QQ(Y/G/F/S) | GFTFS(D/G) | AWI(S/L)PYGGS(T/S) | RHWPGGFDY |
| (V/I)(S/N)T | L(Y/A)S | (L/Y/F/W)(Y/ | SWIH | YYADSVKG | (332) |
| (A/F)(V/L)A | (328) | N/A/T/G/F/ | (330) | (331) | |
| (327) | | I)(H/V/P/T/ | | | |
| | | I)P(A/W/R/P/ | | | |
| | | T)T | | | |
| | | (329) | | | |
| RASQDVSTAVA | SASFLYS | QQYLYHPAT | GFTFSDSWIH | AWISPYGGSTYYADSVKG | |
| (333) | (334) | (335) | (336) | (337) | |

Group D

| | | | | | |
|---|---|---|---|---|---|
| KSSOSLL | WASTRES | (Q/K)QSYDVVT | SYW(I/M)H | YINPSS(D/G)Y(H/K)E | SGWL(I/V) |
| (H/N)(S/T) | (589) | (590) | (591) | Y(S/N)(E/Q)KF(I/M) | HGDYYFD(F/ |
| (R/S)TRKNYLA | | | | D (592) | Y) (593) |
| (588) | | | | | |
| KSSQSLLNSRT | | QQSYDVVT | SYWMH | YINPSSDYNEYSEKFMD | SGWLVHGDY |
| RKNYLA | | (595) | (596) | (597) | YFDY |
| (594) | | | | | (598) |
| KSSQSLLHTST | | KQSYDVVT | GYIFTSYWMH | YINPSSGYHEYNQKFID | SGWLIHGDY |
| RKNYLA | | (600) | (601) | (602) | YFDF |
| (599) | | | | | (603) |
| | | | SYWIH | | |
| | | | (604) | | |
| | | | GTTFTSYWIH | | |
| | | | (605) | | |

Group E

| | | | | | |
|---|---|---|---|---|---|
| TGT(N/S)(T/ | (E/D)V(I/ | SS(F/Y)T(N/ | (K/R/T/Q/G/ | SIYPSGG(F/I)TFYAD | IKLGTVTTV |
| R/S)DVG(A/G) | N/D)(D/ | S)(R/T/S)(G/ | A/W/M/I/S) | (S/T)VKG (610) | (E/D)Y |
| YNYVS | H/N)RPS | S)(I/T)RV | Y(V/R/K/L/ | | (611) |
| (606) | (607) | (608) | M/I)M(H/T/ | | |
| | | | N/Q/A/V/Y/ | | |
| | | | W/F/M) | | |
| | | | (609) | | |
| TGTSSDVGGYN | DVSNRPS | SSYTSSSTRV | SYIMM | SIYPSGGITFYADTVKG | IKLGTVTTV |
| YVS (612) | (613) | (614) | (615) | (617) | DY (618) |

Group F

| | | |
|---|---|---|
| MYMMM | SIYPSGGITFYADSVKG | TGTSSDVGA |
| (619) | (620) | YNYVS |
| | | (621) |

Group G

| | | | | | |
|---|---|---|---|---|---|
| (R/S/K)(A/S) | X(A/C/G/ | (R/N/Q/E/H) | G(Y/F)(T/S) | X(I/L/M/F/V)X(P or | (A/R/N/Q/ |
| S (R/N/D/Q/ | S/T/V)(A/ | QX(A/R/N/C/ | (I/L/M/F) | Absent)(A/R/N/Q/E/ | E/H/K/M/S/ |
| E/H/K/M/S) | C/H/I/L/ | Q/E/H/I/L/K/ | (A/R/N/D/C/ | H/K/M/S/T/Y/V)(A/R/ | T/Y)(A/R/ |
| (SLLYSS or | M/F/S/T/ | M/F/S/T/Y/ | Q/E/H/I/L/ | N/D/C/Q/E/G/H/K/M/ | N/D/C/Q/ |
| Absent)(N/D | Y/V)(R/ | V)(N/G/S)(A/ | K/M/P/S/T/ | F/P/S/T/Y/V)(N/G/ | E/G/H/K/M/ |
| or | N/D/Q/E/ | R/N/D/C/Q/ | W/Y/V)(N/ | S)(N/G/S)T(A/R/N/Q/ | F/P/S/T/ |
| Absent)(A/Q/ | K/S/T)(A/ | E/G/H/I/L/K/ | D/Q/E/K/P/ | E/H/K/M/S/T/Y)(A/ | Y/V)(Q/G/ |
| E/L/K/M/P/ | R/N/D/Q/ | M/F/R/S/T/ | S/T)(A/R/N/ | R/N/C/Q/E/H/I/L/K/ | H/T/W)XXX |
| S/T/Y/V)X(R/ | E/G/H/K/ | W/Y/V)P(A/R/ | D/C/Q/E/G/ | M/F/S/T/W/Y/V)N(A/ | X(F/Y)(AI |
| N/S/T)(A/R/ | M/F/P/S/ | N/D/Q/E/G/ | H/I/L/K/M/ | D/Q/E/K/P/S/T)(A/R/ | or |
| N/C/Q/E/H/ | T/Y)(A/ | H/K/M/P/S/T/ | F/P/S/T/Y/ | N/D/C/Q/E/G/H/I/L/ | Absent) |
| I/L/K/M/F/S/ | N/S/T) | Y) T (624) | V)(A/R/N/ | K/M/F/P/S/T/Y/V) | (627) |
| T/Y/V)(I/L/ | (623) | | D/C/Q/E/G/ | (I/L/M/F)K(A/G/S | |
| M/V)(A/R/N/ | | | H/I/L/K/M/ | (626) | |
| Q/E/H/I/K/ | | | F/P/S/T/Y/ | | |
| M/F/S/T/Y) | | | V)(A/R/C/Q/ | | |
| (622) | | | E/H/I/L/K/ | | |
| | | | M/F/S/T/W/ | | |
| | | | Y/V)N | | |
| | | | (625) | | |
| RASSSVSYIY | ATFNLAS | HQRSSYPWT | GYTFPDYYMN | DIDPNYGGTTYNQKFKG | GAL (633) |
| (628) | (629) | (630) | (631) | (632) | |
| SASSSIRYMH | DTSKLTS | QQDSSYPLT | GYTFTSYDIN | WIFPRDNNTKYNSNFKG | ENWVGDF |
| (634) | (635) | (636) | (637) | (638) | (639) |
| KASQDVGTAVA | WASTRHT | QQYYGYPLT | GYSITSDYWN | YISYTGSTYYNPSLKS | YGGWLSPF |
| (640) | (641) | (642) | (643) | (644) | (645) |
| KSSQSLLYSSN | WASTRES | | GYSIISDYWN | | RGGWLLPF |
| QKNSL (646) | (589) | | (647) | | (648) |
| | | | GFSLTTYSIN | VMWAGGGTNSNSVLKS | YYGNSPYYA |
| | | | (649) | (650) | I (651) |

Group H

| | | | | | |
|---|---|---|---|---|---|
| TRSSGSIGSNY | EDNQRPS | QSYD3STWV | SYAIS | WISPIGGSTNYAQKVQG | GLXXXXXXX |
| VQ (652) | (653) | (654) | (301) | (655) | XXXXXXXXD |
| | | | | | V (656) |
| TRSSGNIASNY | GKNNRPS | QSYDSSNLWV | SYGIS | WISAYNGNTNYAQKLED | ALPSGTILV |
| VQ (657) | (658) | (659) | (660) | (661) | GGWFDP |
| | | | | | (662) |
| QGDSLRSYYAS | SDRDRPS | NSRDSSGNHYV | SYALS | AISGGGGSTYYADSVKD | DVFPETFSM |
| (663) | (664) | (665) | (666) | (667) | NYGMDV |
| | | | | | (668) |
| GGSDIGRKSVH | DVSNRPS | QVWDNNSDHYV | DYAMH | LISGDGGSTYYADSVKD | VLLPCSSTS |
| (669) | (613) | (670) | (671) | (672) | CYGSVGAFD |
| | | | | | I (673) |
| TGTSSDVGGYN | GASSRAT | SSYTSSTLP | NYDMS | RVNWNGGSTTYADAVKD | EFVGAIDL |
| YVS (612) | (294) | (674) | (675) | (676) | (677) |
| RASQSIGNSLA | AASTLQS | QQHTIPTES | GLYIH | WIIPIEGTANYAQKFED | GLRWGIWGW |
| (678) | (679) | (680) | (681) | (682) | FDP (683) |
| RASQGIGSYLA | QDIKRPS | QQLNNYPIT | DNAIS | WIIPIFGKPNYAQKFED | TMVRGFLGV |
| (684) | (685) | (686) | (687) | (688) | MDV (689) |
| SGDKLGNKYAY | EDYRRPS | QTWDNSVV | SYAMS | AISGSGGSTYYADSVKD | DQFVTIFGV |
| (690) | (691) | (692) | (212) | (693) | PRYGMDV |
| | | | | | (694) |
| TRSSGSIDSNY | DDSDRPS | QSYDSNNRHVI | TYALN | RIVPLIGLVNYAHNFED | GRQMFGAGI |
| VQ (695) | (696) | (697) | (698) | (699) | DF (700) |
| TRSSGNIGTNY | EDNKRPS | QSYHSSGWE | SHGIT | WISAHNGHASNAQKVED | EVYGGNSDY |
| VQ (701) | (702) | (703) | (704) | (705) | (706) |
| GGNNIGSKGVH | YKSDSNKQ | QVWDSSSDHWV | RHGMH | VISHDGSVKYYADSMKD | VHAALYYGM |
| (707) | QAS | (709) | (710) | (711) | DV (712) |
| | (708) | | | | |
| TRSSGSIASNY | | QSYDSTTPSV | | WTSPHNGLTAFAQILED | GLSYQVSGW |
| VQ (713) | | (714) | | (715) | FDP (716) |
| TRSSGSIASHY | | QSYDGITVI | | RIIPILGIANYAQKFED | VHPVFSYAL |
| VQ (717) | | (718) | | (719) | DV (720) |
| TLRSGLNVGSY | | QSYDSSNRWV | TYAFS | WISAYNGNTNYAQKVED | DGYGSDPVL |
| RIY (721) | | (722) | (723) | (724) | (725) |
| | | MIWYSSAVV | NYGIS | | GDFRKPFDY |
| | | (726) | (727) | | (728) |

Group I

| | | | | | |
|---|---|---|---|---|---|
| RATESVEYYGT | AASSVDS | QQSRRVPYT | SYVMH | YVNPENDGTKYNEMFKG | QAWGYP |
| SLVQ (729) | (730) | (731) | (732) | (733) | (734) |

Group J

| | | | | | |
|---|---|---|---|---|---|
| RASQDVSTAVA | SASFLYS | QQYLYHPAT | GFTFSDSWIH | AWISPYGGSTYYADSVKG | RHWPGGFDY |
| (333) | (334) | (335) | (336) | (337) | (332) |

Group K

| | | | | | |
|---|---|---|---|---|---|
| QSISNW | KAS | QQYHSYSYT | GFTFSRFW | INQDGTEK (785) | ANTYYDFWSGHFD |
| (781) | (782) | (783) | (784) | | Y (786) |
| QGIRND | TAS | LQHNSYPLT | GFTFSNFG | LWSDGSNK (791) | ARGRGAPGIPIFG |
| (787) | (788) | (789) | (790) | | Y (792) |
| QGIRND | AAS | LQHNNYPYT | GFTFSNAW | IKRKTDGGTT | TTDDIVVVPAVMR |
| (787) | (793) | (794) | (795) | (796) | EYYFGMDV |
| | | | | | (797) |
| QTLVHGDGNTY | KVS | MQATHFPIT | GYSFTGYY | INPNSGTK (802) | ARDEDWNFGSWFD |
| (798) | (799) | (800) | (801) | | S (803) |
| PSLVHSDGNTY | KIS | MQATHFPIT | GYTFTGYY | LNPNTGTT (807) | ARDEDWNYGSWFD |
| (804) | (805) | (800) | (806) | | T (808) |
| QSINSY | VAS | QQSYSTPPIT | GFTFDDYG | IHWHGKRT (813) | VRGGMSTGDWFDP |
| (809) | (810) | (811) | (812) | | (814) |
| QSISSY | VAS | QQSYSTPPIT | GFTFDDYG | IHWSGRST (816) | ARGGMSTGDWFDP |
| (815) | (810) | (811) | (812) | | (817) |
| QTINIY | AAS | HQSYSTPPIT | GFTVGSNY | IYSGGST (821) | ARGIRGLDV |
| (818) | (793) | (819) | (820) | | (822) |
| QSMSSY | AAS | QQSYSTPPIT | GITVGTNY | ISSGGNT (1013) | ARGIRGLDV |
| (1011) | (793) | (811) | (1012) | | (822) |
| QSFNFNY | GAS | QQYESAPWT | GGIFSSST | IIPVFGTV (827) | ARNWGLGSFYI |
| (823) | (824) | (825) | (826) | | (828) |
| QSISSY | AAS | QQSYCTPPIT | GFPFDEYA | ISWSNNNI (831) | AKSGIFDS |
| (815) | (793) | (829) | (830) | | (832) |
| QSISSY | AAS | QQSYSTPPIT | GFTFSSYG | ISYEGRNK (834) | AKDRTLYGMDV |
| (815) | (793) | (811) | (833) | | (835) |
| QVISNY | AAS | QKYNSAPRT | GFSLSTNRMC | IDWDGVK (839) | ARSTSLTFYYFDY |
| (836) | (793) | (837) | (838) | | (840) |
| QNINNY | AAS | QQSYNTPLT | EFTVGTNH | IYSGGNT (844) | ARGLGGMDV |
| (841) | (793) | (842) | (843) | | (845) |
| QTISTY | AAS | LQHNSYPYT | GFTFSKYW | IKGDGSEK (849) | ARDYWGSGYYFDF |
| (846) | (793) | (847) | (848) | | (850) |
| QSISSY | VVS | QQSYSTPFT | GFTFSSYW | IKQDGSEK (854) | ARDDIVVVPAPMG |
| (815) | (851) | (852) | (853) | | YYYYYFGMDV |
| | | | | | (855) |
| | AAS | QQSYSTPPIT | GFTFDDFA | ISWTGGNM (857) | VKDIRGIVATGGA |
| | (793) | (811) | (856) | | FDI (858) |
| | | | GFTVGTNY | IYSGGST (821) | ARGIRGFDI |
| | | | (859) | | (860) |
| | | | GFTISTNY | IYSSGST (862) | ARGIRGFDI |
| | | | (861) | | (860) |
| | | | GFTIDDSA | ISWKSGSI (864) | VKDIRGNWNYGGN |
| | | | (863) | | WFDP (865) |
| | | | GFTVGVNH | IFSSGRT (867) | ARGIGGLDI |
| | | | (866) | | (868) |
| | | | GFTFDDYA | ISWTGGTI (870) | TRDIRGNWKYGGW |
| | | | (869) | | FDP (871) |
| | | | GYTFTAYY | ISPNSGFT (873) | AREGSTHHNSFDP |
| | | | (872) | | (874) |
| | | | GFTVGTNF | IIPILGAA (876) | ARGGGMDV |
| | | | (875) | | (877) |
| | | | GGTFNTYV | ISPYNGYT (879) | ARDRTSGGFDP |
| | | | (878) | | (880) |
| | | | GYIFTHYG | | SPGRGPYWSFDL |
| | | | (881) | | (882) |

Group L

| | | | | | |
|---|---|---|---|---|---|
| QASESVYSNNY | LASTLAS | IGGKSSSTDG | SNGLT | TINKDASAYYASWAK | IAFKTGTSI |
| LS (1014) | (1015) | NA (1016) | (1017) | G (1018) | (1019) |

Group M

| | | | | | |
|---|---|---|---|---|---|
| RSSKSLLHSNG | QMSNLAS | AQNLEPPLT | DYYTH | WIDPENGKTAYAPKF | GGYDVYFLDY |
| ITYLY | (1021) | (1022) | (1023) | QG (1024) | (1025) |
| (1020) | | | | | |

Group N

| | | | | | |
|---|---|---|---|---|---|
| KASQDVGIVVA | WASIRHT | QQYSNYPLYT | GFSLTSYGVH | VIWAGGSTNYNSALM | AKPYGNSAMDY |
| (1026) | (1027) | (1028) | (1029) | S (1030) | (1031) |
| | | | | VIWAGGSTNYVDSVK | AKPYGTSAMDY |
| | | | | G (1032) | (1033) |
| | | | | VIWAGGSTNYADSVK | |
| | | | | G (1034) | |

Group O

| | | | | | |
|---|---|---|---|---|---|
| ASQSVSTSSSS | YASNLES | QHSWEIPYT | SYGMS | SISSGGSTYYPDSVK | GYDSGFAY |
| FMH (1035) | (1036) | (1037) | (1038) | G (1039) | (1040) |
| RASQSVSTSSS | YASNLES | QHSWEIPYT | SYGMS | SISSGGTTYYPDSVK | GYDSGFAY |
| SYMH (1041) | (1036) | (1037) | (1038) | G (1042) | (1040) |
| KASQSVSNDVA | YAANRYT | QQDYTSPYT | TYGVH | VIWRGVTTDYNAAFM | LGFYAMDY |
| (1043) | (1044) | (1045) | (1046) | AS (1047) | (1048) |
| KASQSVSNDVG | YASNRYS | QQDYTSPYT | SYGVH | VIWSGGVTDYNAAFI | LGFYAMDY |
| (1049) | (1050) | (1045) | (1051) | S (1052) | (1048) |
| RSSQIIVHSNA | KVSNRFS | FQGSHVPYT | TYWMH | QINPDSTTINTAPSL | PGDYGYDFDC |
| NTYLE | (1054) | (1055) | (1056) | KD (1057) | (1058) |
| (1053) | | | | | |
| SASSSVSSSYL | NTSNLAS | HQWRSYPPT | SGYWN | YISYSGSTYYNPSLK | SLLWFSTGFAY |
| Y (1059) | (1060) | (1061) | (1062) | S (1063) | (1064) |
| SANSSVSYMH | DTSKLAS | QQWSSNPWT | SYGVH | YIWSGGITDYNAAFK | LGFYAMDY |
| (1065) | (1066) | (1067) | (1051) | S (1068) | (1048) |
| RASQSVSTSSY | YASNLES | QNSWEIPYT | STGMS | SISSGGTTYYLGSVQ | GYDAGFAY |
| SYMH (1069) | (1036) | (1070) | (1071) | G (1072) | (1073) |
| KSSQSLLYSSN | WASNRES | QQYYSYPLT | SGYWT | YIYTGSTYYNPSLKS | QRDWLGFAY |
| QKNSLA | (1075) | (1076) | (1077) | (1078) | (1079) |
| (1074) | | | | | |
| RASQSVSTSSY | YASNLES | QHSWEIPYT | SYGMS | SISSGGSIYYPDSVK | GYDAGFAF |
| SYVH (1080) | (1036) | (1037) | (1038) | G (1081) | (1082) |

Group P

GFTFSMYMMM
(1083)
GFTFSAYAMA
(1084)
GFTFSAYRMF
(1085)
GFTFSAYLMV
(1086)
GFTFSAYVMF
(1087)
GFTFSAYVMS
(1088)
GFTFSGYLMV
(1089)
GFTFSGYQML
(1090)
GFTFSGYSMF
(1091)
GFTFSGYWMA
(1092)
GFTFSQYLMY
(1093)
GFTFSQYVMF
(1094)
GFTFSQYYMY
(1095)
GFTFSSYLMS
(1096)
GFTFSSYLMT
(1097)
GFTFSSYQMV
(1098)
GFTFSSYSMA
(1099)
GFTFSSYVMF
(1100)
GFTFSSYVMS
(1101)
GFTFSSYVMY
(1102)
GFTFSSYYMF
(1103)
GFTFSSYYMV
(1104)
GFTFSYYSMV
(1105)
GFTFSWYLMA
(1106)
GFTFSWYQMS
(1107)

[0331] The ABs in the activatable antibodies of the disclosure specifically bind a PDL1 target, such as, for example, mammalian PDL1, and/or human PDL1. Also included in the disclosure are ABs that bind to the same PDL1 epitope as an antibody of the disclosure and/or an activated activatable antibody described herein. Also included in the disclosure are ABs that compete with an anti-PDL1 antibody and/or an activated anti-PDL1 activatable antibody described herein for binding to a PDL1 target, e.g., human PDL1. Also included in the disclosure are ABs that cross-compete with an anti-PDL1 antibody and/or an activated anti-PDL1 activatable antibody described herein for binding to a PDL1 target, e.g., human PDL1.

[0332] The activatable anti-PDL1 antibodies provided herein include a masking moiety. In some embodiments, the masking moiety is an amino acid sequence that is coupled or otherwise attached to the anti-PDL1 antibody and is positioned within the activatable anti-PDL1 antibody construct such that the masking moiety reduces the ability of the anti-PDL1 antibody to specifically bind PDL1. Suitable masking moieties are identified using any of a variety of known techniques. For example, peptide masking moieties are identified using the methods described in PCT Publication No. WO 2009/025846 by Daugherty et al., the contents of which are hereby incorporated by reference in their entirety.

[0333] The activatable anti-PDL1 antibodies provided herein include a cleavable moiety. In some embodiments, the cleavable moiety includes an amino acid sequence that is a substrate for a protease, usually an extracellular protease. Suitable substrates are identified using any of a variety of known techniques. For example, peptide substrates are identified using the methods described in U.S. Pat. No. 7,666,817 by Daugherty et al.; in U.S. Pat. No. 8,563,269 by Stagliano et al., and in PCT Publication No. WO 2014/026136 by La Porte et al., the contents of each of which are hereby incorporated by reference in their entirety. (See also Boulware et al. “Evolutionary optimization of peptide substrates for proteases that exhibit rapid hydrolysis kinetics.” Biotechnol Bioeng. 106.3 (2010): 339-46).

[0334] Exemplary substrates include but are not limited to substrates cleavable by one or more of the following enzymes or proteases listed in Table 12.

TABLE 12
Exemplary Proteases and/or Enzymes

ADAMS, ADAMTS, e.g.
ADAM8
ADAM9
ADAM10
ADAM12
ADAM15
ADAM17/TACE
ADAMDEC1
ADAMTS1
ADAMTS4
ADAMTS5
Aspartate proteases, e.g.,
BACE
Renin
Aspartic cathepsins, e.g.,
Cathepsin D
Cathepsin E
Caspases, e.g.,
Caspase 1
Caspase 2
Caspase 3
Caspase 4
Caspase 5
Caspase 6
Caspase 7
Caspase 8
Caspase 9
Caspase 10
Caspase 14
Cysteine cathepsins, e.g.,
Cathepsin B
Cathepsin C
Cathepsin K
Cathepsin L
Cathepsin S
Cathepsin V/L2
Cathepsin X/Z/P
Cysteine proteinases, e.g.,
Cruzipain
Legumain
Otubain-2
KLKs, e.g.,
KLK4
KLK5
KLK6
KLK7
KLK8
KLK10
KLK11
KLK13
KLK14
Metallo proteinases, e.g.,
Meprin
Neprilysin
PSMA
BMP-1
MMPs, e.g.,
MMP1
MMP2
MMP3
MMP7
MMP8
MMP9
MMP10
MMP11
MMP12
MMP13
MMP14
MMP15
MMP16
MMP17
MMP19
MMP20
MMP23
MMP24
MMP26
MMP27
Serine proteases, e.g.,
activated protein C
Cathepsin A
Cathepsin G
Chymase
coagulation factor proteases
(e.g., FVIIa, FIXa, FXa, FXIa, FXIIa)
Elastase
Granzyme B
Guanidinobenzoatase
HtrA1
Human Neutrophil Elastase
Lactoferrin
Marapsin
NS3/4A
PACE4
Plasmin
PSA
tPA
Thrombin
Tryptase
uPA
Type II Transmembrane
Serine Proteases (TTSPs), e.g.,
DESC1
DPP-4
FAP
Hepsin
Matriptase-2
MT-SP1/Matriptase
TMPRSS2
TMPRSS3
TMPRSS4

[0335] The activatable anti-PDL1 antibodies described herein overcome a limitation of antibody therapeutics, particularly antibody therapeutics that are known to be toxic to at least some degree in vivo. Target-mediated toxicity constitutes a major limitation for the development of therapeutic antibodies. The activatable anti-PDL1 antibodies provided herein are designed to address the toxicity associated with the inhibition of the target in normal tissues by traditional therapeutic antibodies. These activatable anti-PDL1 antibodies remain masked until proteolytically activated at the site of disease. Starting with an anti-PDL1 antibody as a parental therapeutic antibody, the activatable anti-PDL1 antibodies of the invention were engineered by coupling the antibody to an inhibitory mask through a linker that incorporates a protease substrate.

[0336] When the AB is modified with a MM and is in the presence of the target, specific binding of the AB to its target is reduced or inhibited, as compared to the specific binding of the AB not modified with an MM or the specific binding of the parental AB to the target.

[0337] The K_{d} of the AB modified with a MM towards the target is at least 5, 10, 25, 50, 100, 250, 500, 1,000, 2,500, 5,000, 10,000, 50,000, 100,000, 500,000, 1,000,000, 5,000,000, 10,000,000, 50,000,000 or greater, or between 5-10, 10-100, 10-1,000, 10-10,000, 10-100,000, 10-1,000,000, 10-10,000,000, 100-1,000, 100-10,000, 100-100,000, 100-1,000,000, 100-10,000,000, 1,000-10,000, 1,000-100,000, 1,000-1,000,000, 1000-10,000,000, 10,000-100,000, 10,000-1,000,000, 10,000-10,000,000, 100,000-1,000,000, or 100,000-10,000,000 times greater than the K_{d} of the AB not modified with an MM or of the parental AB towards the target. Conversely, the binding affinity of the AB modified with a MM towards the target is at least 2, 3, 4, 5, 10, 25, 50, 100, 250, 500, 1,000, 2,500, 5,000, 10,000, 50,000, 100,000, 500,000, 1,000,000, 5,000,000, 10,000,000, 50,000,000 or greater, or between 5-10, 10-100, 10-1,000, 10-10,000, 10-100,000, 10-1,000,000, 10-10,000,000, 100-1,000, 100-10,000, 100-100,000, 100-1,000,000, 100-10,000,000, 1,000-10,000, 1,000-100,000, 1,000-1,000,000, 1000-10,000,000, 10,000-100,000, 10,000-1,000,000, 10,000-10,000,000, 100,000-1,000,000, or 100,000-10,000,000 times lower than the binding affinity of the AB not modified with an MM or of the parental AB towards the target.

[0338] In some embodiments, the dissociation constant (K_{d}) of the MM towards the AB is generally greater than the K_{d} of the AB towards the target. The K_{d} of the MM towards the AB can be at least 5, 10, 25, 50, 100, 250, 500, 1,000, 2,500, 5,000, 10,000, 100,000, 1,000,000 or even 10,000,000 times greater than the K_{d} of the AB towards the target. Conversely, the binding affinity of the MM towards the AB is generally lower than the binding affinity of the AB towards the target. The binding affinity of MM towards the AB can be at least 5, 10, 25, 50, 100, 250, 500, 1,000, 2,500, 5,000, 10,000, 100,000, 1,000,000 or even 10,000,000 times lower than the binding affinity of the AB towards the target.

[0339] In some embodiments, the dissociation constant (K_{d}) of the MM towards the AB is approximately equal to the K_{d} of the AB towards the target. In some embodiments, the dissociation constant (K_{d}) of the MM towards the AB is no more than the dissociation constant of the AB towards the target.

[0340] In some embodiments, the dissociation constant (K_{d}) of the MM towards the AB is less than the dissociation constant of the AB towards the target.

[0341] In some embodiments, the dissociation constant (K_{d}) of the MM towards the AB is greater than the dissociation constant of the AB towards the target.

[0342] In some embodiments, the MM has a K_{d} for binding to the AB that is no more than the K_{d} for binding of the AB to the target.

[0343] In some embodiments, the MM has a K_{d} for binding to the AB that is no less than the K_{d} for binding of the AB to the target.

[0344] In some embodiments, the MM has a K_{d} for binding to the AB that is approximately equal to the K_{d} for binding of the AB to the target.

[0345] In some embodiments, the MM has a K_{d} for binding to the AB that is less than the K_{d} for binding of the AB to the target.

[0346] In some embodiments, the MM has a K_{d} for binding to the AB that is greater than the K_{d} for binding of the AB to the target.

[0347] In some embodiments, the MM has a K_{d} for binding to the AB that is no more than 2, 3, 4, 5, 10, 25, 50, 100, 250, 500, or 1,000 fold greater than the K_{d} for binding of the AB to the target. In some embodiments, the MM has a K_{d} for binding to the AB that is between 1-5, 2-5, 2-10, 5-10, 5-20, 5-50, 5-100, 10-100, 10-1,000, 20-100, 20-1000, or 100-1,000 fold greater than the K_{d} for binding of the AB to the target.

[0348] In some embodiments, the MM has an affinity for binding to the AB that is less than the affinity of binding of the AB to the target.

[0349] In some embodiments, the MM has an affinity for binding to the AB that is no more than the affinity of binding of the AB to the target.

[0350] In some embodiments, the MM has an affinity for binding to the AB that is approximately equal of the affinity of binding of the AB to the target.

[0351] In some embodiments, the MM has an affinity for binding to the AB that is no less than the affinity of binding of the AB to the target.

[0352] In some embodiments, the MM has an affinity for binding to the AB that is greater than the affinity of binding of the AB to the target.

[0353] In some embodiments, the MM has an affinity for binding to the AB that is 2, 3, 4, 5, 10, 25, 50, 100, 250, 500, or 1,000 less than the affinity of binding of the AB to the target. I In some embodiments, the MM has an affinity for binding to the AB that is between 1-5, 2-5, 2-10, 5-10, 5-20, 5-50, 5-100, 10-100, 10-1,000, 20-100, 20-1000, or 100-1,000 fold less than the affinity of binding of the AB to the target. In some embodiments, the MM has an affinity for binding to the AB that is 2 to 20 fold less than the affinity of binding of the AB to the target. In some embodiments, a MM not covalently linked to the AB and at equimolar concentration to the AB does not inhibit the binding of the AB to the target.

[0354] When the AB is modified with a MM and is in the presence of the target specific binding of the AB to its target is reduced or inhibited, as compared to the specific binding of the AB not modified with an MM or the specific binding of the parental AB to the target. When compared to the binding of the AB not modified with an MM or the binding of the parental AB to the target the AB's ability to bind the target when modified with an MM can be reduced by at least 50%, 60%, 70%, 80%, 90%, 92%, 93%, 94%, 95%, 96%, 97%, 98%, 99% and even 100% for at least 2, 4, 6, 8, 12, 28, 24, 30, 36, 48, 60, 72, 84, or 96 hours, or 5, 10, 15, 30, 45, 60, 90, 120, 150, or 180 days, or 1, 2, 3, 4, 5, 6, 7, 8, 9, 10, 11, or 12 months or more when measured in vivo or in an in vitro assay.

[0355] The MM inhibits the binding of the AB to the target. The MM binds the antigen binding domain of the AB and inhibits binding of the AB to the target. The MM can sterically inhibit the binding of the AB to the target. The MM can allosterically inhibit the binding of the AB to its target. In these embodiments when the AB is modified or coupled to a MM and in the presence of target there is no binding or substantially no binding of the AB to the target, or no more than 0.001%, 0.01%, 0.1%, 1%, 2%, 3%, 4%, 5%, 6%, 7%, 8%, 9%, 10%, 15%, 20%, 25%, 30%, 35%, 40%, or 50% binding of the AB to the target, as compared to the binding of the AB not modified with an MM, the parental AB, or the AB not coupled to an MM to the target, for at least 2, 4, 6, 8, 12, 28, 24, 30, 36, 48, 60, 72, 84, or 96 hours, or 5, 10, 15, 30, 45, 60, 90, 120, 150, or 180 days, or 1, 2, 3, 4, 5, 6, 7, 8, 9, 10, 11, or 12 months or longer when measured in vivo or in an in vitro assay.

[0356] When an AB is coupled to or modified by a MM, the MM ‘masks’ or reduces or otherwise inhibits the specific binding of the AB to the target. When an AB is coupled to or modified by a MM, such coupling or modification can effect a structural change that reduces or inhibits the ability of the AB to specifically bind its target.

[0357] An AB coupled to or modified with an MM can be represented by the following formulae (in order from an amino (N) terminal region to carboxyl (C) terminal region:

(MM)-(AB)

(AB)-(MM)

(MM)-L-(AB)

(AB)-L-(MM)

where MM is a masking moiety, the AB is an antibody or antibody fragment thereof, and the L is a linker. In many embodiments, it may be desirable to insert one or more linkers, e.g., flexible linkers, into the composition so as to provide for flexibility.

[0358] In certain embodiments, the MM is not a natural binding partner of the AB. In some embodiments, the MM contains no or substantially no homology to any natural binding partner of the AB. In some embodiments, the MM is no more than 5%, 10%, 15%, 20%, 25%, 300, 35%, 40%, 45%, 50%, 55%, 60%, 65%, 70%, 75%, or 80% similar to any natural binding partner of the AB. In some embodiments, the MM is no more than 5%, 10%, 15%, 20%, 25%, 30%, 35%, 40%, 45%, 50%, 55%, 60%, 65%, 70%, 75%, or 80% identical to any natural binding partner of the AB. In some embodiments, the MM is no more than 25% identical to any natural binding partner of the AB. In some embodiments, the MM is no more than 50% identical to any natural binding partner of the AB. In some embodiments, the MM is no more than 20% identical to any natural binding partner of the AB. In some embodiments, the MM is no more than 10% identical to any natural binding partner of the AB.

[0359] In some embodiments, the activatable antibodies include an AB that is modified by an MM and also includes one or more cleavable moieties (CM). Such activatable antibodies exhibit activatable/switchable binding, to the AB's target. Activatable antibodies generally include an antibody or antibody fragment (AB), modified by or coupled to a masking moiety (MM) and a modifiable or cleavable moiety (CM). In some embodiments, the CM contains an amino acid sequence that serves as a substrate for at least one protease.

[0360] The elements of the activatable antibodies are arranged so that the MM and CM are positioned such that in a cleaved (or relatively active) state and in the presence of a target, the AB binds a target while the activatable antibody is in an uncleaved (or relatively inactive) state in the presence of the target, specific binding of the AB to its target is reduced or inhibited. The specific binding of the AB to its target can be reduced due to the inhibition or masking of the AB's ability to specifically bind its target by the MM.

[0361] The K_{d} of the AB modified with a MM and a CM towards the target is at least 5, 10, 25, 50, 100, 250, 500, 1,000, 2,500, 5,000, 10,000, 50,000, 100,000, 500,000, 1,000,000, 5,000,000, 10,000,000, 50,000,000 or greater, or between 5-10, 10-100, 10-1,000, 10-10,000, 10-100,000, 10-1,000,000, 10-10,000,000, 100-1,000, 100-10,000, 100-100,000, 100-1,000,000, 100-10,000,000, 1,000-10,000, 1,000-100,000, 1,000-1,000,000, 1000-10,000,000, 10,000-100,000, 10,000-1,000,000, 10,000-10,000,000, 100,000-1,000,000, or 100,000-10,000,000 times greater than the K_{d} of the AB not modified with an MM and a CM or of the parental AB towards the target. Conversely, the binding affinity of the AB modified with a MM and a CM towards the target is at least 5, 10, 25, 50, 100, 250, 500, 1,000, 2,500, 5,000, 10,000, 50,000, 100,000, 500,000, 1,000,000, 5,000,000, 10,000,000, 50,000,000 or greater, or between 5-10, 10-100, 10-1,000, 10-10,000, 10-100,000, 10-1,000,000, 10-10,000,000, 100-1,000, 100-10,000, 100-100,000, 100-1,000,000, 100-10,000,000, 1,000-10,000, 1,000-100,000, 1,000-1,000,000, 1000-10,000,000, 10,000-100,000, 10,000-1,000,000, 10,000-10,000,000, 100,000-1,000,000, or 100,000-10,000,000 times lower than the binding affinity of the AB not modified with an MM and a CM or of the parental AB towards the target.

[0362] When the AB is modified with a MM and a CM and is in the presence of the target but not in the presence of a modifying agent (for example at least one protease), specific binding of the AB to its target is reduced or inhibited, as compared to the specific binding of the AB not modified with an MM and a CM or of the parental AB to the target. When compared to the binding of the parental AB or the binding of an AB not modified with an MM and a CM to its target, the AB's ability to bind the target when modified with an MM and a CM can be reduced by at least 50%, 60%, 70%, 80%, 90%, 92%, 93%, 94%, 95%, 96%, 97%, 98%, 99% and even 100% for at least 2, 4, 6, 8, 12, 28, 24, 30, 36, 48, 60, 72, 84, or 96 hours or 5, 10, 15, 30, 45, 60, 90, 120, 150, or 180 days, or 1, 2, 3, 4, 5, 6, 7, 8, 9, 10, 11, or 12 months or longer when measured in vivo or in an in vitro assay.

[0363] As used herein, the term cleaved state refers to the condition of the activatable antibodies following modification of the CM by at least one protease. The term uncleaved state, as used herein, refers to the condition of the activatable antibodies in the absence of cleavage of the CM by a protease. As discussed above, the term “activatable antibodies” is used herein to refer to an activatable antibody in both its uncleaved (native) state, as well as in its cleaved state. It will be apparent to the ordinarily skilled artisan that in some embodiments a cleaved activatable antibody may lack an MM due to cleavage of the CM by protease, resulting in release of at least the MM (e.g., where the MM is not joined to the activatable antibodies by a covalent bond (e.g., a disulfide bond between cysteine residues).

[0364] By activatable or switchable is meant that the activatable antibody exhibits a first level of binding to a target when the activatable antibody is in a inhibited, masked or uncleaved state (i.e., a first conformation), and a second level of binding to the target in the uninhibited, unmasked and/or cleaved state (i.e., a second conformation), where the second level of target binding is greater than the first level of binding. In general, the access of target to the AB of the activatable antibody is greater in the presence of a cleaving agent capable of cleaving the CM, i.e., a protease, than in the absence of such a cleaving agent. Thus, when the activatable antibody is in the uncleaved state, the AB is inhibited from target binding and can be masked from target binding (i.e., the first conformation is such the AB cannot bind the target), and in the cleaved state the AB is not inhibited or is unmasked to target binding.

[0365] The CM and AB of the activatable antibodies are selected so that the AB represents a binding moiety for a given target, and the CM represents a substrate for a protease. In some embodiments, the protease is co-localized with the target at a treatment site or diagnostic site in a subject. As used herein, co-localized refers to being at the same site or relatively close nearby. In some embodiments, a protease cleaves a CM yielding an activated antibody that binds to a target located nearby the cleavage site. The activatable antibodies disclosed herein find particular use where, for example, a protease capable of cleaving a site in the CM, i.e., a protease, is present at relatively higher levels in or in close proximity to target-containing tissue of a treatment site or diagnostic site than in tissue of non-treatment sites (for example in healthy tissue). In some embodiments, a CM of the disclosure is also cleaved by one or more other proteases. In some embodiments, it is the one or more other proteases that is co-localized with the target and that is responsible for cleavage of the CM in vivo.

[0366] In some embodiments activatable antibodies provide for reduced toxicity and/or adverse side effects that could otherwise result from binding of the AB at non-treatment sites if the AB were not masked or otherwise inhibited from binding to the target.

[0367] In general, an activatable antibody can be designed by selecting an AB of interest and constructing the remainder of the activatable antibody so that, when conformationally constrained, the MM provides for masking of the AB or reduction of binding of the AB to its target. Structural design criteria can be to be taken into account to provide for this functional feature.

[0368] Activatable antibodies exhibiting a switchable phenotype of a desired dynamic range for target binding in an inhibited versus an uninhibited conformation are provided. Dynamic range generally refers to a ratio of (a) a maximum detected level of a parameter under a first set of conditions to (b) a minimum detected value of that parameter under a second set of conditions. For example, in the context of an activatable antibody, the dynamic range refers to the ratio of (a) a maximum detected level of target protein binding to an activatable antibody in the presence of at least one protease capable of cleaving the CM of the activatable antibodies to (b) a minimum detected level of target protein binding to an activatable antibody in the absence of the protease. The dynamic range of an activatable antibody can be calculated as the ratio of the dissociation constant of an activatable antibody cleaving agent (e.g., enzyme) treatment to the dissociation constant of the activatable antibodies cleaving agent treatment. The greater the dynamic range of an activatable antibody, the better the switchable phenotype of the activatable antibody. Activatable antibodies having relatively higher dynamic range values (e.g., greater than 1) exhibit more desirable switching phenotypes such that target protein binding by the activatable antibodies occurs to a greater extent (e.g., predominantly occurs) in the presence of a cleaving agent (e.g., enzyme) capable of cleaving the CM of the activatable antibodies than in the absence of a cleaving agent.

[0369] Activatable antibodies can be provided in a variety of structural configurations. Exemplary formulae for activatable antibodies are provided below. It is specifically contemplated that the N- to C-terminal order of the AB, MM and CM may be reversed within an activatable antibody. It is also specifically contemplated that the CM and MM may overlap in amino acid sequence, e.g., such that the CM is contained within the MM.

[0370] For example, activatable antibodies can be represented by the following formula (in order from an amino (N) terminal region to carboxyl (C) terminal region:

(MM)-(CM)-(AB)

(AB)-(CM)-(MM)

where MM is a masking moiety, CM is a cleavable moiety, and AB is an antibody or fragment thereof. It should be noted that although MM and CM are indicated as distinct components in the formulae above, in all exemplary embodiments (including formulae) disclosed herein it is contemplated that the amino acid sequences of the MM and the CM could overlap, e.g., such that the CM is completely or partially contained within the MM. In addition, the formulae above provide for additional amino acid sequences that may be positioned N-terminal or C-terminal to the activatable antibodies elements.

[0371] In certain embodiments, the MM is not a natural binding partner of the AB. In some embodiments, the MM contains no or substantially no homology to any natural binding partner of the AB. In some embodiments, the MM is no more than 5%, 10%, 15%, 20%, 25%, 30%, 35%, 40%, 45%, 50%, 55%, 60%, 65%, 70%, 75%, or 80% similar to any natural binding partner of the AB. In some embodiments, the MM is no more than 5%, 10%, 15%, 20%, 25%, 30%, 35%, 40%, 45%, 50%, 55%, 60%, 65%, 70%, 75%, or 80% identical to any natural binding partner of the AB. In some embodiments, the MM is no more than 50% identical to any natural binding partner of the AB. In some embodiments, the MM is no more than 25% identical to any natural binding partner of the AB. In some embodiments, the MM is no more than 20% identical to any natural binding partner of the AB. In some embodiments, the MM is no more than 10% identical to any natural binding partner of the AB.

[0372] In many embodiments it may be desirable to insert one or more linkers, e.g., flexible linkers, into the activatable antibody construct so as to provide for flexibility at one or more of the MM-CM junction, the CM-AB junction, or both. For example, the AB, MM, and/or CM may not contain a sufficient number of residues (e.g., Gly, Ser, Asp, Asn, especially Gly and Ser, particularly Gly) to provide the desired flexibility. As such, the switchable phenotype of such activatable antibody constructs may benefit from introduction of one or more amino acids to provide for a flexible linker. In addition, as described below, where the activatable antibody is provided as a conformationally constrained construct, a flexible linker can be operably inserted to facilitate formation and maintenance of a cyclic structure in the uncleaved activatable antibody.

[0373] For example, in certain embodiments an activatable antibody comprises one of the following formulae (where the formula below represent an amino acid sequence in either N- to C-terminal direction or C- to N-terminal direction):

(MM)-L1-(CM)-(AB)

(MM)-(CM)-L2-(AB)

(MM)-L1-(CM)-L2-(AB)

wherein MM, CM, and AB are as defined above; wherein L1 and L2 are each independently and optionally present or absent, are the same or different flexible linkers that include at least 1 flexible amino acid (e.g., Gly). In addition, the formulae above provide for additional amino acid sequences that may be positioned N-terminal or C-terminal to the activatable antibodies elements. Examples include, but are not limited to, targeting moieties (e.g., a ligand for a receptor of a cell present in a target tissue) and serum half-life extending moieties (e.g., polypeptides that bind serum proteins, such as immunoglobulin (e.g., IgG) or serum albumin (e.g., human serum albumin (HAS)).

[0374] The CM is specifically cleaved by at least one protease at a rate of about 0.001-1500×10⁴ M⁻¹S⁻¹ or at least 0.001, 0.005, 0.01, 0.05, 0.1, 0.5, 1, 2.5, 5, 7.5, 10, 15, 20, 25, 50, 75, 100, 125, 150, 200, 250, 500, 750, 1000, 1250, or 1500×10⁴ M⁻¹S⁻¹. In some embodiments, the CM is specifically cleaved at a rate of about 100,000 M⁻¹S⁻¹. In some embodiments, the CM is specifically cleaved at a rate from about 1×10E2 to about 1×10E6 M⁻¹S⁻¹ (i.e., from about 1×10² to about 1×10⁶ M⁻¹S⁻¹).

[0375] For specific cleavage by an enzyme, contact between the enzyme and CM is made. When the activatable antibody comprising an AB coupled to a MM and a CM is in the presence of target and sufficient enzyme activity, the CM can be cleaved. Sufficient enzyme activity can refer to the ability of the enzyme to make contact with the CM and effect cleavage. It can readily be envisioned that an enzyme may be in the vicinity of the CM but unable to cleave because of other cellular factors or protein modification of the enzyme.

[0376] Linkers suitable for use in compositions described herein are generally ones that provide flexibility of the modified AB or the activatable antibodies to facilitate the inhibition of the binding of the AB to the target. Such linkers are generally referred to as flexible linkers. Suitable linkers can be readily selected and can be of any of a suitable of different lengths, such as from 1 amino acid (e.g., Gly) to 20 amino acids, from 2 amino acids to 15 amino acids, from 3 amino acids to 12 amino acids, including 4 amino acids to 10 amino acids, 5 amino acids to 9 amino acids, 6 amino acids to 8 amino acids, or 7 amino acids to 8 amino acids, and may be 1, 2, 3, 4, 5, 6, 7, 8, 9, 10, 11, 12, 13, 14, 15, 16, 17, 18, 19, or 20 amino acids in length.

[0377] Exemplary flexible linkers include glycine polymers (G)n, glycine-serine polymers (including, for example, (GS)n, (GSGGS)n (SEQ ID NO: 191) and (GGGS)n (SEQ ID NO: 192), where n is an integer of at least one), glycine-alanine polymers, alanine-serine polymers, and other flexible linkers known in the art. Glycine and glycine-serine polymers are relatively unstructured, and therefore may be able to serve as a neutral tether between components. Glycine accesses significantly more phi-psi space than even alanine, and is much less restricted than residues with longer side chains (see Scheraga, Rev. Computational Chem. 11173-142 (1992)). Exemplary flexible linkers include, but are not limited to Gly-Gly-Ser-Gly (SEQ ID NO: 193), Gly-Gly-Ser-Gly-Gly (SEQ ID NO: 194), Gly-Ser-Gly-Ser-Gly (SEQ ID NO: 195), Gly-Ser-Gly-Gly-Gly (SEQ ID NO: 196), Gly-Gly-Gly-Ser-Gly (SEQ ID NO: 197), Gly-Ser-Ser-Ser-Gly (SEQ ID NO: 198), and the like. The ordinarily skilled artisan will recognize that design of an activatable antibodies can include linkers that are all or partially flexible, such that the linker can include a flexible linker as well as one or more portions that confer less flexible structure to provide for a desired activatable antibodies structure.

[0378] The disclosure also provides compositions and methods that include an activatable anti-PDL1 antibody that includes an antibody or antibody fragment (AB) that specifically binds PDL1, where the AB is coupled to a masking moiety (MM) that decreases the ability of the AB to bind its target. In some embodiments, the activatable anti-PDL1 antibody further includes a cleavable moiety (CM) that is a substrate for a protease. The compositions and methods provided herein enable the attachment of one or more agents to one or more cysteine residues in the AB without compromising the activity (e.g., the masking, activating or binding activity) of the activatable anti-PDL1 antibody. In some embodiments, the compositions and methods provided herein enable the attachment of one or more agents to one or more cysteine residues in the AB without reducing or otherwise disturbing one or more disulfide bonds within the MM. The compositions and methods provided herein produce an activatable anti-PDL1 antibody that is conjugated to one or more agents, e.g., any of a variety of therapeutic, diagnostic and/or prophylactic agents, for example, in some embodiments, without any of the agent(s) being conjugated to the MM of the activatable anti-PDL1 antibody. The compositions and methods provided herein produce conjugated activatable anti-PDL1 antibodies in which the MM retains the ability to effectively and efficiently mask the AB of the activatable antibody in an uncleaved state. The compositions and methods provided herein produce conjugated activatable anti-PDL1 antibodies in which the activatable antibody is still activated, i.e., cleaved, in the presence of a protease that can cleave the CM.

[0379] The activatable anti-PDL1 antibodies have at least one point of conjugation for an agent, but in the methods and compositions provided herein less than all possible points of conjugation are available for conjugation to an agent. In some embodiments, the one or more points of conjugation are sulfur atoms involved in disulfide bonds. In some embodiments, the one or more points of conjugation are sulfur atoms involved in interchain disulfide bonds. In some embodiments, the one or more points of conjugation are sulfur atoms involved in interchain sulfide bonds, but not sulfur atoms involved in intrachain disulfide bonds. In some embodiments, the one or more points of conjugation are sulfur atoms of cysteine or other amino acid residues containing a sulfur atom. Such residues may occur naturally in the antibody structure or may be incorporated into the antibody by site-directed mutagenesis, chemical conversion, or mis-incorporation of non-natural amino acids.

[0380] Also provided are methods of preparing a conjugate of an activatable anti-PDL1 antibody having one or more interchain disulfide bonds in the AB and one or more intrachain disulfide bonds in the MM, and a drug reactive with free thiols is provided. The method generally includes partially reducing interchain disulfide bonds in the activatable antibody with a reducing agent, such as, for example, TCEP; and conjugating the drug reactive with free thiols to the partially reduced activatable antibody. As used herein, the term partial reduction refers to situations where an activatable anti-PDL1 antibody is contacted with a reducing agent and less than all disulfide bonds, e.g., less than all possible sites of conjugation are reduced. In some embodiments, less than 99%, 98%, 97%, 96%, 95%, 90%, 85%, 80%, 75%, 70%, 65%, 60%, 55%, 50%, 45%, 40%, 35%, 30%, 25%, 20%, 15%, 10% or less than 5% of all possible sites of conjugation are reduced.

[0381] In yet other embodiments, a method of reducing and conjugating an agent, e.g., a drug, to an activatable anti-PDL1 antibody resulting in selectivity in the placement of the agent is provided. The method generally includes partially reducing the activatable anti-PDL1 antibody with a reducing agent such that any conjugation sites in the masking moiety or other non-AB portion of the activatable antibody are not reduced, and conjugating the agent to interchain thiols in the AB. The conjugation site(s) are selected so as to allow desired placement of an agent to allow conjugation to occur at a desired site. The reducing agent is, for example, TCEP. The reduction reaction conditions such as, for example, the ratio of reducing agent to activatable antibody, the length of incubation, the temperature during the incubation, the pH of the reducing reaction solution, etc., are determined by identifying the conditions that produce a conjugated activatable antibody in which the MM retains the ability to effectively and efficiently mask the AB of the activatable antibody in an uncleaved state. The ratio of reduction agent to activatable anti-PDL1 antibody will vary depending on the activatable antibody. In some embodiments, the ratio of reducing agent to activatable anti-PDL1 antibody will be in a range from about 20:1 to 1:1, from about 10:1 to 1:1, from about 9:1 to 1:1, from about 8:1 to 1:1, from about 7:1 to 1:1, from about 6:1 to 1:1, from about 5:1 to 1:1, from about 4:1 to 1:1, from about 3:1 to 1:1, from about 2:1 to 1:1, from about 20:1 to 1:1.5, from about 10:1 to 1:1.5, from about 9:1 to 1:1.5, from about 8:1 to 1:1.5, from about 7:1 to 1:1.5, from about 6:1 to 1:1.5, from about 5:1 to 1:1.5, from about 4:1 to 1:1.5, from about 3:1 to 1:1.5, from about 2:1 to 1:1.5, from about 1.5:1 to 1:1.5, or from about 1:1 to 1:1.5. In some embodiments, the ratio is in a range of from about 5:1 to 1:1. In some embodiments, the ratio is in a range of from about 5:1 to 1.5:1. In some embodiments, the ratio is in a range of from about 4:1 to 1:1. In some embodiments, the ratio is in a range from about 4:1 to 1.5:1. In some embodiments, the ratio is in a range from about 8:1 to about 1:1. In some embodiments, the ratio is in a range of from about 2.5:1 to 1:1.

[0382] In some embodiments, a method of reducing interchain disulfide bonds in the AB of an activatable anti-PDL1 antibody and conjugating an agent, e.g., a thiol-containing agent such as a drug, to the resulting interchain thiols to selectively locate agent(s) on the AB is provided. The method generally includes partially reducing the AB with a reducing agent to form at least two interchain thiols without forming all possible interchain thiols in the activatable antibody; and conjugating the agent to the interchain thiols of the partially reduced AB. For example, the AB of the activatable antibody is partially reduced for about 1 hour at about 37° C. at a desired ratio of reducing agent:activatable antibody. In some embodiments, the ratio of reducing agent to activatable antibody will be in a range from about 20:1 to 1:1, from about 10:1 to 1:1, from about 9:1 to 1:1, from about 8:1 to 1:1, from about 7:1 to 1:1, from about 6:1 to 1:1, from about 5:1 to 1:1, from about 4:1 to 1:1, from about 3:1 to 1:1, from about 2:1 to 1:1, from about 20:1 to 1:1.5, from about 10:1 to 1:1.5, from about 9:1 to 1:1.5, from about 8:1 to 1:1.5, from about 7:1 to 1:1.5, from about 6:1 to 1:1.5, from about 5:1 to 1:1.5, from about 4:1 to 1:1.5, from about 3:1 to 1:1.5, from about 2:1 to 1:1.5, from about 1.5:1 to 1:1.5, or from about 1:1 to 1:1.5. In some embodiments, the ratio is in a range of from about 5:1 to 1:1. In some embodiments, the ratio is in a range of from about 5:1 to 1.5:1. In some embodiments, the ratio is in a range of from about 4:1 to 1:1. In some embodiments, the ratio is in a range from about 4:1 to 1.5:1. In some embodiments, the ratio is in a range from about 8:1 to about 1:1. In some embodiments, the ratio is in a range of from about 2.5:1 to 1:1.

[0383] The thiol-containing reagent can be, for example, cysteine or N-acetyl cysteine. The reducing agent can be, for example, TCEP. In some embodiments, the reduced activatable antibody can be purified prior to conjugation, using for example, column chromatography, dialysis, or diafiltration. Alternatively, the reduced antibody is not purified after partial reduction and prior to conjugation.

[0384] The invention also provides partially reduced activatable anti-PDL1 antibodies in which at least one interchain disulfide bond in the activatable antibody has been reduced with a reducing agent without disturbing any intrachain disulfide bonds in the activatable antibody, wherein the activatable antibody includes an antibody or an antigen binding fragment thereof (AB) that specifically binds to PDL1, a masking moiety (MM) that inhibits the binding of the AB of the activatable antibody in an uncleaved state to the PDL1 target, and a cleavable moiety (CM) coupled to the AB, wherein the CM is a polypeptide that functions as a substrate for a protease. In some embodiments the MM is coupled to the AB via the CM. In some embodiments, one or more intrachain disulfide bond(s) of the activatable antibody is not disturbed by the reducing agent. In some embodiments, one or more intrachain disulfide bond(s) of the MM within the activatable antibody is not disturbed by the reducing agent. In some embodiments, the activatable antibody in the uncleaved state has the structural arrangement from N-terminus to C-terminus as follows: MM-CM-AB or AB-CM-MM. In some embodiments, reducing agent is TCEP.

[0385] The disclosure also provides partially reduced activatable antibodies in which at least one interchain disulfide bond in the activatable antibody has been reduced with a reducing agent without disturbing any intrachain disulfide bonds in the activatable antibody, wherein the activatable antibody includes an antibody or an antigen binding fragment thereof (AB) that specifically binds to the target, e.g., PDL1, a masking moiety (MM) that inhibits the binding of the AB of the activatable antibody in an uncleaved state to the target, and a cleavable moiety (CM) coupled to the AB, wherein the CM is a polypeptide that functions as a substrate for at least one protease. In some embodiments, the MM is coupled to the AB via the CM. In some embodiments, one or more intrachain disulfide bond(s) of the activatable antibody is not disturbed by the reducing agent. In some embodiments, one or more intrachain disulfide bond(s) of the MM within the activatable antibody is not disturbed by the reducing agent. In some embodiments, the activatable antibody in the uncleaved state has the structural arrangement from N-terminus to C-terminus as follows: MM-CM-AB or AB-CM-MM. In some embodiments, reducing agent is TCEP.

[0386] In some embodiments, the activatable antibodies described herein also include an agent conjugated to the activatable antibody. In some embodiments, the conjugated agent is a therapeutic agent, such as an anti-inflammatory and/or an antineoplastic agent. In such embodiments, the agent is conjugated to a carbohydrate moiety of the activatable antibody, for example, in some embodiments, where the carbohydrate moiety is located outside the antigen-binding region of the antibody or antigen-binding fragment in the activatable antibody. In some embodiments, the agent is conjugated to a sulfhydryl group of the antibody or antigen-binding fragment in the activatable antibody.

[0387] In some embodiments, the agent is a cytotoxic agent such as a toxin (e.g., an enzymatically active toxin of bacterial, fungal, plant, or animal origin, or fragments thereof), or a radioactive isotope (i.e., a radioconjugate).

[0388] In some embodiments, the agent is a detectable moiety such as, for example, a label or other marker. For example, the agent is or includes a radiolabeled amino acid, one or more biotinyl moieties that can be detected by marked avidin (e.g., streptavidin containing a fluorescent marker or enzymatic activity that can be detected by optical or calorimetric methods), one or more radioisotopes or radionuclides, one or more fluorescent labels, one or more enzymatic labels, and/or one or more chemiluminescent agents. In some embodiments, detectable moieties are attached by spacer molecules.

[0389] The disclosure also pertains to immunoconjugates comprising an antibody conjugated to a cytotoxic agent such as a toxin (e.g., an enzymatically active toxin of bacterial, fungal, plant, or animal origin, or fragments thereof), or a radioactive isotope (i.e., a radioconjugate). Suitable cytotoxic agents include, for example, dolastatins and derivatives thereof (e.g. auristatin E, AFP, MMAF, MMAE, MMAD, DMAF, DMAE). For example, the agent is monomethyl auristatin E (MMAE) or monomethyl auristatin D (MMAD). In some embodiments, the agent is an agent selected from the group listed in Table 11. In some embodiments, the agent is a dolastatin. In some embodiments, the agent is an auristatin or derivative thereof. In some embodiments, the agent is auristatin E or a derivative thereof. In some embodiments, the agent is monomethyl auristatin E (MMAE). In some embodiments, the agent is monomethyl auristatin D (MMAD). In some embodiments, the agent is a maytansinoid or maytansinoid derivative. In some embodiments, the agent is DM1 or DM4. In some embodiments, the agent is a duocarmycin or derivative thereof. In some embodiments, the agent is a calicheamicin or derivative thereof. In some embodiments, the agent is a pyrrolobenzodiazepine. In some embodiments, the agent is a pyrrolobenzodiazepine dimer.

[0390] In some embodiments, the agent is linked to the AB using a maleimide caproyl-valine-citrulline linker or a maleimide PEG-valine-citrulline linker. In some embodiments, the agent is linked to the AB using a maleimide caproyl-valine-citrulline linker. In some embodiments, the agent is linked to the AB using a maleimide PEG-valine-citrulline linker In some embodiments, the agent is monomethyl auristatin D (MMAD) linked to the AB using a maleimide PEG-valine-citrulline-para-aminobenzyloxycarbonyl linker, and this linker payload construct is referred to herein as “vc-MMAD.” In some embodiments, the agent is monomethyl auristatin E (MMAE) linked to the AB using a maleimide PEG-valine-citrulline-para-aminobenzyloxycarbonyl linker, and this linker payload construct is referred to herein as “vc-MMAE.” The structures of vc-MMAD and vc-MMAE are shown below:

[chemical structure]

[0391] The disclosure also provides conjugated activatable antibodies that include an activatable antibody linked to monomethyl auristatin D (MMAD) payload, wherein the activatable antibody includes an antibody or an antigen binding fragment thereof (AB) that specifically binds to a target, a masking moiety (MM) that inhibits the binding of the AB of the activatable antibody in an uncleaved state to the target, and cleavable moiety (CM) coupled to the AB, and the CM is a polypeptide that functions as a substrate for at least one MMP protease.

[0392] In some embodiments, the MMAD-conjugated activatable antibody can be conjugated using any of several methods for attaching agents to ABs: (a) attachment to the carbohydrate moieties of the AB, or (b) attachment to sulfhydryl groups of the AB, or (c) attachment to amino groups of the AB, or (d) attachment to carboxylate groups of the AB.

[0393] In some embodiments, the MMAD payload is conjugated to the AB via a linker. In some embodiments, the MMAD payload is conjugated to a cysteine in the AB via a linker. In some embodiments, the MMAD payload is conjugated to a lysine in the AB via a linker. In some embodiments, the MMAD payload is conjugated to another residue of the AB via a linker, such as those residues disclosed herein. In some embodiments, the linker is a thiol-containing linker. In some embodiments, the linker is a cleavable linker. In some embodiments, the linker is a non-cleavable linker. In some embodiments, the linker is selected from the group consisting of the linkers shown in Tables 13 and 14. In some embodiments, the activatable antibody and the MMAD payload are linked via a maleimide caproyl-valine-citrulline linker. In some embodiments, the activatable antibody and the MMAD payload are linked via a maleimide PEG-valine-citrulline linker. In some embodiments, the activatable antibody and the MMAD payload are linked via a maleimide caproyl-valine-citrulline-para-aminobenzyloxycarbonyl linker. In some embodiments, the activatable antibody and the MMAD payload are linked via a maleimide PEG-valine-citrulline-para-aminobenzyloxycarbonyl linker. In some embodiments, the MMAD payload is conjugated to the AB using the partial reduction and conjugation technology disclosed herein.

[0394] In some embodiments, the polyethylene glycol (PEG) component of a linker of the present disclosure is formed from 2 ethylene glycol monomers, 3 ethylene glycol monomers, 4 ethylene glycol monomers, 5 ethylene glycol monomers, 6 ethylene glycol monomers, 7 ethylene glycol monomers 8 ethylene glycol monomers, 9 ethylene glycol monomers, or at least 10 ethylene glycol monomers. In some embodiments of the present disclosure, the PEG component is a branched polymer. In some embodiments of the present disclosure, the PEG component is an unbranched polymer. In some embodiments, the PEG polymer component is functionalized with an amino group or derivative thereof, a carboxyl group or derivative thereof, or both an amino group or derivative thereof and a carboxyl group or derivative thereof.

[0395] In some embodiments, the PEG component of a linker of the present disclosure is an amino-tetra-ethylene glycol-carboxyl group or derivative thereof. In some embodiments, the PEG component of a linker of the present disclosure is an amino-tri-ethylene glycol-carboxyl group or derivative thereof. In some embodiments, the PEG component of a linker of the present disclosure is an amino-di-ethylene glycol-carboxyl group or derivative thereof. In some embodiments, an amino derivative is the formation of an amide bond between the amino group and a carboxyl group to which it is conjugated. In some embodiments, a carboxyl derivative is the formation of an amide bond between the carboxyl group and an amino group to which it is conjugated. In some embodiments, a carboxyl derivative is the formation of an ester bond between the carboxyl group and an hydroxyl group to which it is conjugated.

[0396] Enzymatically active toxins and fragments thereof that can be used include diphtheria A chain, nonbinding active fragments of diphtheria toxin, exotoxin A chain (from Pseudomonas aeruginosa), ricin A chain, abrin A chain, modeccin A chain, alpha-sarcin, Aleurites fordii proteins, dianthin proteins, Phytolaca americana proteins (PAPI, PAPII, and PAP-S), momordica charantia inhibitor, curcin, crotin, sapaonaria officinalis inhibitor, gelonin, mitogellin, restrictocin, phenomycin, enomycin, and the tricothecenes. A variety of radionuclides are available for the production of radioconjugated antibodies. Examples include ²¹²Bi, ¹³¹I, ¹³¹In, ⁹⁰Y, and ¹⁸⁶Re.

[0397] Conjugates of the antibody and cytotoxic agent are made using a variety of bifunctional protein-coupling agents such as N-succinimidyl-3-(2-pyridyldithiol) propionate (SPDP), iminothiolane (IT), bifunctional derivatives of imidoesters (such as dimethyl adipimidate HCL), active esters (such as disuccinimidyl suberate), aldehydes (such as glutareldehyde), bis-azido compounds (such as bis (p-azidobenzoyl) hexanediamine), bis-diazonium derivatives (such as bis-(p-diazoniumbenzoyl)-ethylenediamine), diisocyanates (such as tolyene 2,6-diisocyanate), and bis-active fluorine compounds (such as 1,5-difluoro-2,4-dinitrobenzene). For example, a ricin immunotoxin can be prepared as described in Vitetta et al., Science 238. 1098 (1987). Carbon-14-labeled 1-isothiocyanatobenzyl-3-methyldiethylene triaminepentaacetic acid (MX-DTPA) is an exemplary chelating agent for conjugation of radionucleotide to the antibody. (See WO94/11026).

[0398] Table 11 lists some of the exemplary pharmaceutical agents that may be employed in the herein described disclosure but in no way is meant to be an exhaustive list.

TABLE 11
Exemplary Pharmaceutical Agents for Conjugation

CYTOTOXIC AGENTS
Auristatins
Auristatin E
Monomethyl auristatin D (MMAD)
Monomethyl auristatin E (MMAE)
Desmethyl auristatin E (DMAE)
Auristatin F
Monomethyl auristatin F (MMAF)
Desmethyl auristatin F (DMAF)
Auristatin derivatives, e.g., amides thereof
Auristatin tyramine
Auristatin quinoline
Dolastatins
Dolastatin derivatives
Dolastatin 16 DmJ
Dolastatin 16 Dpv
Maytansinoids, e.g. DM-1; DM-4
Maytansinoid derivatives
Duocarmycin
Duocarmycin derivatives
Alpha-amanitin
Anthracyclines
Doxorubicin
Daunorubicin
Bryostatins
Camptothecin
Camptothecin derivatives
7-substituted Camptothecin
10,11-Difluoromethylenedioxycamptothecin
Combretastatins
Debromoaplysiatoxin
Kahalalide-F
Discodermolide
Ecteinascidins
ANTIVIRALS
Acyclovir
Vira A
Symmetrel
ANTIFUNGALS
Nystatin
ADDITIONAL ANTI-NEOPLASTICS
Adriamycin
Cerubidine
Bleomycin
Alkeran
Velban
Oncovin
Fluorouracil
Methotrexate
Thiotepa
Bisantrene
Novantrone
Thioguanine
Procarabizine
Cytarabine
ANTI-BACTERIALS
Aminoglycosides
Streptomycin
Neomycin
Kanamycin
Amikacin
Gentamicin
Tobramycin
Streptomycin B
Spectinomycin
Ampicillin
Sulfanilamide
Polymyxin
Chloramphenicol
Turbostatin
Phenstatins
Hydroxyphenstatin
Spongistatin 5
Spongistatin 7
Halistatin 1
Halistatin 2
Halistatin 3
Modified Bryostatins
Halocomstatins
Pyrrolobenzimidazoles (PBI)
Cibrostatin6
Doxaliform
Anthracyclins analogues
Cemadotin analogue (CemCH2-SH)
Pseudomonas toxin A (PE38) variant
Pseudomonas toxin A (ZZ-PE38) variant
ZJ-101
OSW-1
4-Nitrobenzyloxycarbonyl Derivatives of O6-Benzylguanine
Topoisomerase inhibitors
Hemiasterlin
Cephalotaxine
Homoharringtonine
Pyrrolobenzodiazepine dimers (PBDs)
Pyrrolobenzodiazepenes
Functionalized pyrrolobenzodiazepenes
Functionalized pyrrolobenzodiazepene
dimers
Calicheamicins
Podophyllotoxins
Taxanes
Vinca alkaloids
CONJUGATABLE DETECTION REAGENTS
Fluorescein and derivatives thereof
Fluorescein isothiocyanate (FITC)
RADIOPHARMACEUTICALS
¹²⁵I
¹³¹I
⁸⁹Zr
¹¹¹In
¹²³I
¹³¹I
⁹⁹mTc
²⁰¹Tl
^{l33}Xe
¹¹C
⁶²Cu
¹⁸F
⁶⁸Ga
¹³N
¹⁵O
³⁸K
⁸²Rb
⁹⁹mTc (Technetium)
HEAVY METALS
Barium
Gold
Platinum
ANTI-MYCOPLASMALS
Tylosine
Spectinomycin

[0399] Those of ordinary skill in the art will recognize that a large variety of possible moieties can be coupled to the resultant antibodies of the disclosure. (See, for example, “Conjugate Vaccines”, Contributions to Microbiology and Immunology, J. M. Cruse and R. E. Lewis, Jr (eds), Carger Press, New York, (1989), the entire contents of which are incorporated herein by reference).

[0400] Coupling may be accomplished by any chemical reaction that will bind the two molecules so long as the antibody and the other moiety retain their respective activities. This linkage can include many chemical mechanisms, for instance covalent binding, affinity binding, intercalation, coordinate binding and complexation. In some embodiments, the binding is, however, covalent binding. Covalent binding can be achieved either by direct condensation of existing side chains or by the incorporation of external bridging molecules. Many bivalent or polyvalent linking agents are useful in coupling protein molecules, such as the antibodies of the present disclosure, to other molecules. For example, representative coupling agents can include organic compounds such as thioesters, carbodiimides, succinimide esters, diisocyanates, glutaraldehyde, diazobenzenes and hexamethylene diamines. This listing is not intended to be exhaustive of the various classes of coupling agents known in the art but, rather, is exemplary of the more common coupling agents. (See Killen and Lindstrom, Jour. Immun. 133:1335-2549 (1984); Jansen et al., Immunological Reviews 62:185-216 (1982), and Vitetta et al., Science 238:1098 (1987).

[0401] In some embodiments, in addition to the compositions and methods provided herein, the conjugated activatable antibody can also be modified for site-specific conjugation through modified amino acid sequences inserted or otherwise included in the activatable antibody sequence. These modified amino acid sequences are designed to allow for controlled placement and/or dosage of the conjugated agent within a conjugated activatable antibody. For example, the activatable antibody can be engineered to include cysteine substitutions at positions on light and heavy chains that provide reactive thiol groups and do not negatively impact protein folding and assembly, nor alter antigen binding. In some embodiments, the activatable antibody can be engineered to include or otherwise introduce one or more non-natural amino acid residues within the activatable antibody to provide suitable sites for conjugation. In some embodiments, the activatable antibody can be engineered to include or otherwise introduce enzymatically activatable peptide sequences within the activatable antibody sequence.

[0402] Suitable linkers are described in the literature. (See, for example, Ramakrishnan, S. et al., Cancer Res. 44:201-208 (1984) describing use of MBS (M-maleimidobenzoyl-N-hydroxysuccinimide ester). See also, U.S. Pat. No. 5,030,719, describing use of halogenated acetyl hydrazide derivative coupled to an antibody by way of an oligopeptide linker. In some embodiments, suitable linkers include: (i) EDC (1-ethyl-3-(3-dimethylamino-propyl) carbodiimide hydrochloride; (ii) SMPT (4-succinimidyloxycarbonyl-alpha-methyl-alpha-(2-pridyl-dithio)-toluene (Pierce Chem. Co., Cat. (21558G); (iii) SPDP (succinimidyl-6 [3-(2-pyridyldithio) propionamido]hexanoate (Pierce Chem. Co., Cat #21651G); (iv) Sulfo-LC-SPDP (sulfosuccinimidyl 6 [3-(2-pyridyldithio)-propianamide]hexanoate (Pierce Chem. Co. Cat. #2165-G), and (v) sulfo-NHS (N-hydroxysulfo-succinimide: Pierce Chem. Co., Cat. #24510) conjugated to EDC. Additional linkers include, but are not limited to, SMCC, sulfo-SMCC, SPDB, or sulfo-SPDB.

[0403] The linkers described above contain components that have different attributes, thus leading to conjugates with differing physio-chemical properties. For example, sulfo-NHS esters of alkyl carboxylates are more stable than sulfo-NHS esters of aromatic carboxylates. NHS-ester containing linkers are less soluble than sulfo-NHS esters. Further, the linker SMPT contains a sterically hindered disulfide bond, and can form conjugates with increased stability. Disulfide linkages, are in general, less stable than other linkages because the disulfide linkage is cleaved in vitro, resulting in less conjugate available. Sulfo-NHS, in particular, can enhance the stability of carbodimide couplings. Carbodimide couplings (such as EDC) when used in conjunction with sulfo-NHS, forms esters that are more resistant to hydrolysis than the carbodimide coupling reaction alone.

[0404] In some embodiments, the linkers are cleavable. In some embodiments, the linkers are non-cleavable. In some embodiments, two or more linkers are present. The two or more linkers are all the same, i.e., cleavable or non-cleavable, or the two or more linkers are different, i.e., at least one cleavable and at least one non-cleavable.

[0405] The present disclosure utilizes several methods for attaching agents to ABs: (a) attachment to the carbohydrate moieties of the AB, or (b) attachment to sulfhydryl groups of the AB, or (c) attachment to amino groups of the AB, or (d) attachment to carboxylate groups of the AB. According to the disclosure, ABs may be covalently attached to an agent through an intermediate linker having at least two reactive groups, one to react with AB and one to react with the agent. The linker, which may include any compatible organic compound, can be chosen such that the reaction with AB (or agent) does not adversely affect AB reactivity and selectivity. Furthermore, the attachment of linker to agent might not destroy the activity of the agent. Suitable linkers for reaction with oxidized antibodies or oxidized antibody fragments include those containing an amine selected from the group consisting of primary amine, secondary amine, hydrazine, hydrazide, hydroxylamine, phenylhydrazine, semicarbazide and thiosemicarbazide groups. Such reactive functional groups may exist as part of the structure of the linker, or may be introduced by suitable chemical modification of linkers not containing such groups.

[0406] According to the present disclosure, suitable linkers for attachment to reduced ABs include those having certain reactive groups capable of reaction with a sulfhydryl group of a reduced antibody or fragment. Such reactive groups include, but are not limited to: reactive haloalkyl groups (including, for example, haloacetyl groups), p-mercuribenzoate groups and groups capable of Michael-type addition reactions (including, for example, maleimides and groups of the type described by Mitra and Lawton, 1979, J. Amer. Chem. Soc. 101: 3097-3110).

[0407] According to the present disclosure, suitable linkers for attachment to neither oxidized nor reduced Abs include those having certain functional groups capable of reaction with the primary amino groups present in unmodified lysine residues in the Ab. Such reactive groups include, but are not limited to, NHS carboxylic or carbonic esters, sulfo-NHS carboxylic or carbonic esters, 4-nitrophenyl carboxylic or carbonic esters, pentafluorophenyl carboxylic or carbonic esters, acyl imidazoles, isocyanates, and isothiocyanates.

[0408] According to the present disclosure, suitable linkers for attachment to neither oxidized nor reduced Abs include those having certain functional groups capable of reaction with the carboxylic acid groups present in aspartate or glutamate residues in the Ab, which have been activated with suitable reagents. Suitable activating reagents include EDC, with or without added NHS or sulfo-NHS, and other dehydrating agents utilized for carboxamide formation. In these instances, the functional groups present in the suitable linkers would include primary and secondary amines, hydrazines, hydroxylamines, and hydrazides.

[0409] The agent may be attached to the linker before or after the linker is attached to the AB. In certain applications it may be desirable to first produce an AB-linker intermediate in which the linker is free of an associated agent. Depending upon the particular application, a specific agent may then be covalently attached to the linker. In some embodiments, the AB is first attached to the MM, CM and associated linkers and then attached to the linker for conjugation purposes.

[0410] Branched Linkers:

[0411] In specific embodiments, branched linkers that have multiple sites for attachment of agents are utilized. For multiple site linkers, a single covalent attachment to an AB would result in an AB-linker intermediate capable of binding an agent at a number of sites. The sites may be aldehyde or sulfhydryl groups or any chemical site to which agents can be attached.

[0412] In some embodiments, higher specific activity (or higher ratio of agents to AB) can be achieved by attachment of a single site linker at a plurality of sites on the AB. This plurality of sites may be introduced into the AB by either of two methods. First, one may generate multiple aldehyde groups and/or sulfhydryl groups in the same AB. Second, one may attach to an aldehyde or sulfhydryl of the AB a “branched linker” having multiple functional sites for subsequent attachment to linkers. The functional sites of the branched linker or multiple site linker may be aldehyde or sulfhydryl groups, or may be any chemical site to which linkers may be attached. Still higher specific activities may be obtained by combining these two approaches, that is, attaching multiple site linkers at several sites on the AB.

[0413] Cleavable Linkers:

[0414] Peptide linkers that are susceptible to cleavage by enzymes of the complement system, such as but not limited to u-plasminogen activator, tissue plasminogen activator, trypsin, plasmin, or another enzyme having proteolytic activity may be used in one embodiment of the present disclosure. According to one method of the present disclosure, an agent is attached via a linker susceptible to cleavage by complement. The antibody is selected from a class that can activate complement. The antibody-agent conjugate, thus, activates the complement cascade and releases the agent at the target site. According to another method of the present disclosure, an agent is attached via a linker susceptible to cleavage by enzymes having a proteolytic activity such as a u-plasminogen activator, a tissue plasminogen activator, plasmin, or trypsin. These cleavable linkers are useful in conjugated activatable antibodies that include an extracellular toxin, e.g., by way of non-limiting example, any of the extracellular toxins shown in Table 11.

[0415] Non-limiting examples of cleavable linker sequences are provided in Table 13.

TABLE 13
Exemplary Linker Sequences for Conjugation

| Types of Cleavable Sequences | Amino Acid Sequence |
|---|---|
| Plasmin cleavable sequences | |
| Pro-urokinase | PRFKIIGG (SEQ ID NO: 396) |
| | PRFRIIGG (SEQ ID NO: 397) |
| TGFβ | SSRHRRALD (SEQ ID NO: 398) |
| Plasminogen | RKSSIIIRMRDVVL (SEQ ID NO: 399) |
| Staphylokinase | SSSFDKGKYKKGDDA (SEQ ID NO: 400) |
| | SSSFDKGKYKRGDDA (SEQ ID NO: 401) |
| Factor Xa cleavable sequences | IEGR (SEQ ID NO: 402) |
| | IDGR (SEQ ID NO: 403) |
| | GGSIDGR (SEQ ID NO: 404) |
| MMP cleavable sequences | |
| Gelatinase A | PLGLWA (SEQ ID NO: 405) |
| Collagenase cleavable sequences | |
| Calf skin collagen (α1(I) chain) | GPQGIAGQ (SEQ ID NO: 406) |
| Calf skin collagen (α2(I) chain) | GPQGLLGA (SEQ ID NO: 407) |
| Bovine cartilage collagen (α1(II) chain) | GIAGQ (SEQ ID NO: 408) |
| Human liver collagen (α1(III) chain) | GPLGIAGI (SEQ ID NO: 409) |
| Human α₂M | GPEGLRVG (SEQ ID NO: 410) |
| Human PZP | YGAGLGVV (SEQ ID NO: 411) |
| | AGLGVVER (SEQ ID NO: 412) |
| | AGLGISST (SEQ ID NO: 413) |
| Rat α₁M | EPQALAMS (SEQ ID NO: 414) |
| | QALAMSAI (SEQ ID NO: 415) |
| Rat α₂M | AAYHLVSQ (SEQ ID NO: 416) |
| | MDAFLESS (SEQ ID NO: 417) |
| Rat α₁I₃(2J) | ESLPVVAV (SEQ ID NO: 418) |
| Rat α₁I₃(2J) | SAPAVESE (SEQ ID NO: 419) |
| Human fibroblast collagenase | DVAQFVLT (SEQ ID NO: 420) |
| (autolytic cleavages) | VAQFVLTE (SEQ ID NO: 421) |
| | AQFVLTEG (SEQ ID NO: 422) |
| | PVQPIGPQ (SEQ ID NO: 423) |

[0416] In addition, agents may be attached via disulfide bonds (for example, the disulfide bonds on a cysteine molecule) to the AB. Since many tumors naturally release high levels of glutathione (a reducing agent) this can reduce the disulfide bonds with subsequent release of the agent at the site of delivery. In some embodiments, the reducing agent that would modify a CM would also modify the linker of the conjugated activatable antibody.

[0417] Spacers and Cleavable Elements:

[0418] In some embodiments, it may be necessary to construct the linker in such a way as to optimize the spacing between the agent and the AB of the activatable antibody. This may be accomplished by use of a linker of the general structure:

W—(CH₂)n-Q

wherein
W is either —NH—CH₂— or —CH₂—;
Q is an amino acid, peptide; and
n is an integer from 0 to 20.

[0419] In some embodiments, the linker may comprise a spacer element and a cleavable element. The spacer element serves to position the cleavable element away from the core of the AB such that the cleavable element is more accessible to the enzyme responsible for cleavage. Certain of the branched linkers described above may serve as spacer elements.

[0420] Throughout this discussion, it should be understood that the attachment of linker to agent (or of spacer element to cleavable element, or cleavable element to agent) need not be particular mode of attachment or reaction. Any reaction providing a product of suitable stability and biological compatibility is acceptable.

[0421] Serum Complement and Selection of Linkers:

[0422] According to one method of the present disclosure, when release of an agent is desired, an AB that is an antibody of a class that can activate complement is used. The resulting conjugate retains both the ability to bind antigen and activate the complement cascade. Thus, according to this embodiment of the present disclosure, an agent is joined to one end of the cleavable linker or cleavable element and the other end of the linker group is attached to a specific site on the AB. For example, if the agent has an hydroxy group or an amino group, it may be attached to the carboxy terminus of a peptide, amino acid or other suitably chosen linker via an ester or amide bond, respectively. For example, such agents may be attached to the linker peptide via a carbodimide reaction. If the agent contains functional groups that would interfere with attachment to the linker, these interfering functional groups can be blocked before attachment and deblocked once the product conjugate or intermediate is made. The opposite or amino terminus of the linker is then used either directly or after further modification for binding to an AB that is capable of activating complement.

[0423] Linkers (or spacer elements of linkers) may be of any desired length, one end of which can be covalently attached to specific sites on the AB of the activatable antibody. The other end of the linker or spacer element may be attached to an amino acid or peptide linker.

[0424] Thus when these conjugates bind to antigen in the presence of complement the amide or ester bond that attaches the agent to the linker will be cleaved, resulting in release of the agent in its active form. These conjugates, when administered to a subject, will accomplish delivery and release of the agent at the target site, and are particularly effective for the in vivo delivery of pharmaceutical agents, antibiotics, antimetabolites, antiproliferative agents and the like as presented in but not limited to those in Table 11.

[0425] Linkers for Release without Complement Activation:

[0426] In yet another application of targeted delivery, release of the agent without complement activation is desired since activation of the complement cascade will ultimately lyse the target cell. Hence, this approach is useful when delivery and release of the agent should be accomplished without killing the target cell. Such is the goal when delivery of cell mediators such as hormones, enzymes, corticosteroids, neurotransmitters, genes or enzymes to target cells is desired. These conjugates may be prepared by attaching the agent to an AB that is not capable of activating complement via a linker that is mildly susceptible to cleavage by serum proteases. When this conjugate is administered to an individual, antigen-antibody complexes will form quickly whereas cleavage of the agent will occur slowly, thus resulting in release of the compound at the target site.

[0427] Biochemical Cross Linkers:

[0428] In some embodiments, the activatable antibody may be conjugated to one or more therapeutic agents using certain biochemical cross-linkers. Cross-linking reagents form molecular bridges that tie together functional groups of two different molecules. To link two different proteins in a step-wise manner, hetero-bifunctional cross-linkers can be used that eliminate unwanted homopolymer formation.

[0429] Peptidyl linkers cleavable by lysosomal proteases are also useful, for example, Val-Cit, Val-Ala or other dipeptides. In addition, acid-labile linkers cleavable in the low-pH environment of the lysosome may be used, for example: bis-sialyl ether. Other suitable linkers include cathepsin-labile substrates, particularly those that show optimal function at an acidic pH.

[0430] Exemplary hetero-bifunctional cross-linkers are referenced in Table 14.

TABLE 14
Exemplary Hetero-Bifunctional Cross Linkers
HETERO-BIFUNCTIONAL CROSS-LINKERS

| | | | Spacer Arm |
|---|---|---|---|
| | | | Length after |
| | Reactive | Advantages and | cross-linking |
| Linker | Toward | Applications | (Angstroms) |
| SMPT | Primary amines | Greater stability | 11.2 Å |
| | Sulfhydryls | | |
| SPDP | Primary amines | Thiolation | 6.8 Å |
| | Sulfhydryls | Cleavable cross- | |
| | | linking | |
| LC-SPDP | Primary amines | Extended spacer arm | 15.6 Å |
| | Sulfhydryls | | |
| Sulfo-LC- | Primary amines | Extender spacer arm | 15.6 Å |
| SPDP | Sulfhydryls | Water-soluble | |
| SMCC | Primary amines | Stable maleimide | 11.6 Å |
| | | reactive group | |
| | Sulfhydryls | Enzyme-antibody | |
| | | conjugation | |
| | | Hapten-carrier protein | |
| | | conjugation | |
| Sulfo-SMCC | Primary amines | Stable maleimide | 11.6 Å |
| | | reactive group | |
| | Sulfhydryls | Water-soluble | |
| | | Enzyme-antibody | |
| | | conjugation | |
| MBS | Primary amines | Enzyme-antibody | 9.9 Å |
| | | conjugation | |
| | Sulfhydryls | Hapten-carrier protein | |
| | | conjugation | |
| Sulfo-MBS | Primary amines | Water-soluble | 9.9 Å |
| | Sulfhydryls | | |
| SIAB | Primary amines | Enzyme-antibody | 10.6 Å |
| | | conjugation | |
| | Sulfhydryls | | |
| Sulfo-SIAB | Primary amines | Water-soluble | 10.6 Å |
| | Sulfhydryls | | |
| SMPB | Primary amines | Extended spacer arm | 14.5 Å |
| | Sulfhydryls | Enzyme-antibody | |
| | | conjugation | |
| Sulfo-SMPB | Primary amines | Extended spacer arm | 14.5 Å |
| | Sulfhydryls | Water-soluble | |
| EDE/Sulfo- | Primary amines | Hapten-Carrier | 0 |
| NHS | | conjugation | |
| | Carboxyl groups | | |
| ABH | Carbohydrates | Reacts with sugar | 11.9 Å |
| | | groups | |
| | Nonselective | | |

[0431] Non-Cleavable Linkers or Direct Attachment:

[0432] In some embodiments of the disclosure, the conjugate may be designed so that the agent is delivered to the target but not released. This may be accomplished by attaching an agent to an AB either directly or via a non-cleavable linker.

[0433] These non-cleavable linkers may include amino acids, peptides, D-amino acids or other organic compounds that may be modified to include functional groups that can subsequently be utilized in attachment to ABs by the methods described herein. A-general formula for such an organic linker could be

W—(CH₂)n-Q

wherein
W is either —NH—CH₂— or —CH₂—;
Q is an amino acid, peptide; and
n is an integer from 0 to 20.

[0434] Non-Cleavable Conjugates:

[0435] In some embodiments, a compound may be attached to ABs that do not activate complement. When using ABs that are incapable of complement activation, this attachment may be accomplished using linkers that are susceptible to cleavage by activated complement or using linkers that are not susceptible to cleavage by activated complement.

[0436] The antibodies disclosed herein can also be formulated as immunoliposomes. Liposomes containing the antibody are prepared by methods known in the art, such as described in Epstein et al., Proc. Natl. Acad. Sci. USA, 82: 3688 (1985); Hwang et al., Proc. Natl Acad. Sci. USA, 77: 4030 (1980); and U.S. Pat. Nos. 4,485,045 and 4,544,545. Liposomes with enhanced circulation time are disclosed in U.S. Pat. No. 5,013,556.

[0437] Particularly useful liposomes can be generated by the reverse-phase evaporation method with a lipid composition comprising phosphatidylcholine, cholesterol, and PEG-derivatized phosphatidylethanolamine (PEG-PE). Liposomes are extruded through filters of defined pore size to yield liposomes with the desired diameter. Fab′ fragments of the antibody of the present disclosure can be conjugated to the liposomes as described in Martin et al., J. Biol. Chem., 257: 286-288 (1982) via a disulfide-interchange reaction.

### DEFINITIONS

[0438] Unless otherwise defined, scientific and technical terms used in connection with the present disclosure shall have the meanings that are commonly understood by those of ordinary skill in the art. The term “a” entity or “an” entity refers to one or more of that entity. For example, a compound refers to one or more compounds. As such, the terms “a”, “an”, “one or more” and “at least one” can be used interchangeably. Further, unless otherwise required by context, singular terms shall include pluralities and plural terms shall include the singular. Generally, nomenclatures utilized in connection with, and techniques of, cell and tissue culture, molecular biology, and protein and oligo- or polynucleotide chemistry and hybridization described herein are those well-known and commonly used in the art. Standard techniques are used for recombinant DNA, oligonucleotide synthesis, and tissue culture and transformation (e.g., electroporation, lipofection). Enzymatic reactions and purification techniques are performed according to manufacturer's specifications or as commonly accomplished in the art or as described herein. The foregoing techniques and procedures are generally performed according to conventional methods well known in the art and as described in various general and more specific references that are cited and discussed throughout the present specification. See e.g., Sambrook et al. Molecular Cloning: A Laboratory Manual (2d ed., Cold Spring Harbor Laboratory Press, Cold Spring Harbor, N.Y. (1989)). The nomenclatures utilized in connection with, and the laboratory procedures and techniques of, analytical chemistry, synthetic organic chemistry, and medicinal and pharmaceutical chemistry described herein are those well-known and commonly used in the art. Standard techniques are used for chemical syntheses, chemical analyses, pharmaceutical preparation, formulation, and delivery, and treatment of patients.

[0439] As utilized in accordance with the present disclosure, the following terms, unless otherwise indicated, shall be understood to have the following meanings:

[0440] As used herein, the term “antibody” refers to immunoglobulin molecules and immunologically active portions of immunoglobulin (Ig) molecules, i.e., molecules that contain an antigen binding site that specifically binds (immunoreacts with) an antigen. By “specifically bind” or “immunoreacts with” or “immunospecifically bind” is meant that the antibody reacts with one or more antigenic determinants of the desired antigen and does not react with other polypeptides or binds at much lower affinity (K_{d}>10⁻⁶). Antibodies include, but are not limited to, polyclonal, monoclonal, chimeric, domain antibody, single chain, Fab, and F(ab′)₂ fragments, scFvs, and an Fab expression library.

[0441] The basic antibody structural unit is known to comprise a tetramer. Each tetramer is composed of two identical pairs of polypeptide chains, each pair having one “light” (about 25 kDa) and one “heavy” chain (about 50-70 kDa). The amino-terminal portion of each chain includes a variable region of about 100 to 110 or more amino acids primarily responsible for antigen recognition. The carboxy-terminal portion of each chain defines a constant region primarily responsible for effector function. In general, antibody molecules obtained from humans relate to any of the classes IgG, IgM, IgA, IgE and IgD, which differ from one another by the nature of the heavy chain present in the molecule. Certain classes have subclasses as well, such as IgG₁, IgG₂, and others. Furthermore, in humans, the light chain may be a kappa chain or a lambda chain.

[0442] The term “monoclonal antibody” (mAb) or “monoclonal antibody composition”, as used herein, refers to a population of antibody molecules that contain only one molecular species of antibody molecule consisting of a unique light chain gene product and a unique heavy chain gene product. In particular, the complementarity determining regions (CDRs) of the monoclonal antibody are identical in all the molecules of the population. MAbs contain an antigen binding site capable of immunoreacting with a particular epitope of the antigen characterized by a unique binding affinity for it.

[0443] The term “antigen-binding site” or “binding portion” refers to the part of the immunoglobulin molecule that participates in antigen binding. The antigen binding site is formed by amino acid residues of the N-terminal variable (“V”) regions of the heavy (“H”) and light (“L”) chains. Three highly divergent stretches within the V regions of the heavy and light chains, referred to as “hypervariable regions,” are interposed between more conserved flanking stretches known as “framework regions,” or “FRs”. Thus, the term “FR” refers to amino acid sequences that are naturally found between, and adjacent to, hypervariable regions in immunoglobulins. In an antibody molecule, the three hypervariable regions of a light chain and the three hypervariable regions of a heavy chain are disposed relative to each other in three dimensional space to form an antigen-binding surface. The antigen-binding surface is complementary to the three-dimensional surface of a bound antigen, and the three hypervariable regions of each of the heavy and light chains are referred to as “complementarity-determining regions,” or “CDRs.” The assignment of amino acids to each domain is in accordance with the definitions of Kabat Sequences of Proteins of Immunological Interest (National Institutes of Health, Bethesda, Md. (1987 and 1991)), or Chothia & Lesk J. Mol. Biol. 196:901-917 (1987), Chothia et al. Nature 342:878-883 (1989).

[0444] As used herein, the term “epitope” includes any protein determinant capable of specific binding to an immunoglobulin, an scFv, or a T-cell receptor. The term “epitope” includes any protein determinant capable of specific binding to an immunoglobulin or T-cell receptor. Epitopic determinants usually consist of chemically active surface groupings of molecules such as amino acids or sugar side chains and usually have specific three dimensional structural characteristics, as well as specific charge characteristics. For example, antibodies may be raised against N-terminal or C-terminal peptides of a polypeptide. An antibody is said to specifically bind an antigen when the dissociation constant is ≦1 μM; in some embodiments, ≦100 nM and in some embodiments, ≦10 nM.

[0445] As used herein, the terms “specific binding,” “immunological binding,” and “immunological binding properties” refer to the non-covalent interactions of the type which occur between an immunoglobulin molecule and an antigen for which the immunoglobulin is specific. The strength, or affinity of immunological binding interactions can be expressed in terms of the dissociation constant (K_{d}) of the interaction, wherein a smaller K_{d} represents a greater affinity. Immunological binding properties of selected polypeptides can be quantified using methods well known in the art. One such method entails measuring the rates of antigen-binding site/antigen complex formation and dissociation, wherein those rates depend on the concentrations of the complex partners, the affinity of the interaction, and geometric parameters that equally influence the rate in both directions. Thus, both the “on rate constant” (Kₒₙ) and the “off rate constant” (K_{off}) can be determined by calculation of the concentrations and the actual rates of association and dissociation. (See Nature 361:186-87 (1993)). The ratio of K_{off}/Kₒₙ enables the cancellation of all parameters not related to affinity, and is equal to the dissociation constant K_{d}. (See, generally, Davies et al. (1990) Annual Rev Biochem 59:439-473). An antibody of the present disclosure is said to specifically bind to the target, when the binding constant (K_{d}) is ≦1 μM, in some embodiments≦100 nM, in some embodiments≦10 nM, and in some embodiments≦100 pM to about 1 pM, as measured by assays such as radioligand binding assays or similar assays known to those skilled in the art.

[0446] The term “isolated polynucleotide” as used herein shall mean a polynucleotide of genomic, cDNA, or synthetic origin or some combination thereof, which by virtue of its origin the “isolated polynucleotide” (1) is not associated with all or a portion of a polynucleotide in which the “isolated polynucleotide” is found in nature, (2) is operably linked to a polynucleotide which it is not linked to in nature, or (3) does not occur in nature as part of a larger sequence. Polynucleotides in accordance with the disclosure include the nucleic acid molecules encoding the heavy chain immunoglobulin molecules shown herein, and nucleic acid molecules encoding the light chain immunoglobulin molecules shown herein.

[0447] The term “isolated protein” referred to herein means a protein of cDNA, recombinant RNA, or synthetic origin or some combination thereof, which by virtue of its origin, or source of derivation, the “isolated protein” (1) is not associated with proteins found in nature, (2) is free of other proteins from the same source, e.g., free of murine proteins, (3) is expressed by a cell from a different species, or (4) does not occur in nature.

[0448] The term “polypeptide” is used herein as a generic term to refer to native protein, fragments, or analogs of a polypeptide sequence. Hence, native protein fragments, and analogs are species of the polypeptide genus. Polypeptides in accordance with the disclosure comprise the heavy chain immunoglobulin molecules shown herein, and the light chain immunoglobulin molecules shown herein, as well as antibody molecules formed by combinations comprising the heavy chain immunoglobulin molecules with light chain immunoglobulin molecules, such as kappa light chain immunoglobulin molecules, and vice versa, as well as fragments and analogs thereof.

[0449] The term “naturally-occurring” as used herein as applied to an object refers to the fact that an object can be found in nature. For example, a polypeptide or polynucleotide sequence that is present in an organism (including viruses) that can be isolated from a source in nature and that has not been intentionally modified by man in the laboratory or otherwise is naturally-occurring.

[0450] The term “operably linked” as used herein refers to positions of components so described are in a relationship permitting them to function in their intended manner. A control sequence “operably linked” to a coding sequence is ligated in such a way that expression of the coding sequence is achieved under conditions compatible with the control sequences.

[0451] The term “control sequence” as used herein refers to polynucleotide sequences that are necessary to effect the expression and processing of coding sequences to which they are ligated. The nature of such control sequences differs depending upon the host organism in prokaryotes, such control sequences generally include promoter, ribosomal binding site, and transcription termination sequence in eukaryotes, generally, such control sequences include promoters and transcription termination sequence. The term “control sequences” is intended to include, at a minimum, all components whose presence is essential for expression and processing, and can also include additional components whose presence is advantageous, for example, leader sequences and fusion partner sequences. The term “polynucleotide” as referred to herein means nucleotides of at least 10 bases in length, either ribonucleotides or deoxynucleotides or a modified form of either type of nucleotide. The term includes single and double stranded forms of DNA.

[0452] The term oligonucleotide referred to herein includes naturally occurring, and modified nucleotides linked together by naturally occurring, and non-naturally occurring oligonucleotide linkages. Oligonucleotides are a polynucleotide subset generally comprising a length of 200 bases or fewer. In some embodiments, oligonucleotides are 10 to 60 bases in length and in some embodiments, 12, 13, 14, 15, 16, 17, 18, 19, or 20 to 40 bases in length. Oligonucleotides are usually single stranded, e.g., for probes, although oligonucleotides may be double stranded, e.g., for use in the construction of a gene mutant. Oligonucleotides of the disclosure are either sense or antisense oligonucleotides.

[0453] The term “naturally occurring nucleotides” referred to herein includes deoxyribonucleotides and ribonucleotides. The term “modified nucleotides” referred to herein includes nucleotides with modified or substituted sugar groups and the like. The term “oligonucleotide linkages” referred to herein includes oligonucleotide linkages such as phosphorothioate, phosphorodithioate, phosphoroselerloate, phosphorodiselenoate, phosphoroanilothioate, phoshoraniladate, phosphoronmidate, and the like. See e.g., LaPlanche et al. Nucl. Acids Res. 14:9081 (1986); Stec et al. J. Am. Chem. Soc. 106:6077 (1984), Stein et al. Nucl. Acids Res. 16:3209 (1988), Zon et al. Anti Cancer Drug Design 6:539 (1991); Zon et al. Oligonucleotides and Analogues: A Practical Approach, pp. 87-108 (F. Eckstein, Ed., Oxford University Press, Oxford England (1991)); Stec et al. U.S. Pat. No. 5,151,510, Uhlmann and Peyman Chemical Reviews 90:543 (1990). An oligonucleotide can include a label for detection, if desired.

[0454] As used herein, the twenty conventional amino acids and their abbreviations follow conventional usage. See Immunology—A Synthesis (2nd Edition, E. S. Golub and D. R. Green, Eds., Sinauer Associates, Sunderland, Mass. (1991)). Stereoisomers (e.g., D-amino acids) of the twenty conventional amino acids, unnatural amino acids such as α-, α-disubstituted amino acids, N-alkyl amino acids, lactic acid, and other unconventional amino acids may also be suitable components for polypeptides of the present disclosure. Examples of unconventional amino acids include: 4 hydroxyproline, γ-carboxyglutamate, ε-N,N,N-trimethyllysine, ε-N-acetyllysine, O-phosphoserine, N-acetylserine, N-formylmethionine, 3-methylhistidine, 5-hydroxylysine, σ-N-methylarginine, and other similar amino acids and imino acids (e.g., 4-hydroxyproline). In the polypeptide notation used herein, the left-hand direction is the amino terminal direction and the right-hand direction is the carboxy-terminal direction, in accordance with standard usage and convention.

[0455] Similarly, unless specified otherwise, the left-hand end of single-stranded polynucleotide sequences is the 5′ end the left-hand direction of double-stranded polynucleotide sequences is referred to as the 5′ direction. The direction of 5′ to 3′ addition of nascent RNA transcripts is referred to as the transcription direction sequence regions on the DNA strand having the same sequence as the RNA and that are 5′ to the 5′ end of the RNA transcript are referred to as “upstream sequences”, sequence regions on the DNA strand having the same sequence as the RNA and that are 3′ to the 3′ end of the RNA transcript are referred to as “downstream sequences”.

[0456] As applied to polypeptides, the term “substantial identity” means that two peptide sequences, when optimally aligned, such as by the programs GAP or BESTFIT using default gap weights, share at least 80 percent sequence identity, in some embodiments, at least 90 percent sequence identity, in some embodiments, at least 95 percent sequence identity, and in some embodiments, at least 99 percent sequence identity.

[0457] In some embodiments, residue positions that are not identical differ by conservative amino acid substitutions.

[0458] As discussed herein, minor variations in the amino acid sequences of antibodies or immunoglobulin molecules are contemplated as being encompassed by the present disclosure, providing that the variations in the amino acid sequence maintain at least 75%, in some embodiments, at least 80%, 90%, 95%, and in some embodiments, 99%. In particular, conservative amino acid replacements are contemplated. Conservative replacements are those that take place within a family of amino acids that are related in their side chains. Genetically encoded amino acids are generally divided into families: (1) acidic amino acids are aspartate, glutamate; (2) basic amino acids are lysine, arginine, histidine; (3) non-polar amino acids are alanine, valine, leucine, isoleucine, proline, phenylalanine, methionine, tryptophan, and (4) uncharged polar amino acids are glycine, asparagine, glutamine, cysteine, serine, threonine, tyrosine. The hydrophilic amino acids include arginine, asparagine, aspartate, glutamine, glutamate, histidine, lysine, serine, and threonine. The hydrophobic amino acids include alanine, cysteine, isoleucine, leucine, methionine, phenylalanine, proline, tryptophan, tyrosine and valine. Other families of amino acids include (i) serine and threonine, which are the aliphatic-hydroxy family; (ii) asparagine and glutamine, which are the amide containing family; (iii) alanine, valine, leucine and isoleucine, which are the aliphatic family; and (iv) phenylalanine, tryptophan, and tyrosine, which are the aromatic family. For example, it is reasonable to expect that an isolated replacement of a leucine with an isoleucine or valine, an aspartate with a glutamate, a threonine with a serine, or a similar replacement of an amino acid with a structurally related amino acid will not have a major effect on the binding or properties of the resulting molecule, especially if the replacement does not involve an amino acid within a framework site. Whether an amino acid change results in a functional peptide can readily be determined by assaying the specific activity of the polypeptide derivative. Assays are described in detail herein. Fragments or analogs of antibodies or immunoglobulin molecules can be readily prepared by those of ordinary skill in the art. Suitable amino- and carboxy-termini of fragments or analogs occur near boundaries of functional domains. Structural and functional domains can be identified by comparison of the nucleotide and/or amino acid sequence data to public or proprietary sequence databases. In some embodiments, computerized comparison methods are used to identify sequence motifs or predicted protein conformation domains that occur in other proteins of known structure and/or function. Methods to identify protein sequences that fold into a known three-dimensional structure are known. Bowie et al. Science 253:164 (1991). Thus, the foregoing examples demonstrate that those of skill in the art can recognize sequence motifs and structural conformations that may be used to define structural and functional domains in accordance with the disclosure.

[0459] Suitable amino acid substitutions are those that: (1) reduce susceptibility to proteolysis, (2) reduce susceptibility to oxidation, (3) alter binding affinity for forming protein complexes, (4) alter binding affinities, and (5) confer or modify other physicochemical or functional properties of such analogs. Analogs can include various muteins of a sequence other than the naturally-occurring peptide sequence. For example, single or multiple amino acid substitutions (for example, conservative amino acid substitutions) may be made in the naturally-occurring sequence (for example, in the portion of the polypeptide outside the domain(s) forming intermolecular contacts. A conservative amino acid substitution should not substantially change the structural characteristics of the parent sequence (e.g., a replacement amino acid should not tend to break a helix that occurs in the parent sequence, or disrupt other types of secondary structure that characterizes the parent sequence). Examples of art-recognized polypeptide secondary and tertiary structures are described in Proteins, Structures and Molecular Principles (Creighton, Ed., W. H. Freeman and Company, New York (1984)); Introduction to Protein Structure (C. Branden and J. Tooze, eds., Garland Publishing, New York, N.Y. (1991)); and Thornton et at. Nature 354:105 (1991).

[0460] The term “polypeptide fragment” as used herein refers to a polypeptide that has an amino terminal and/or carboxy-terminal deletion and/or one or more internal deletion(s), but where the remaining amino acid sequence is identical to the corresponding positions in the naturally-occurring sequence deduced, for example, from a full length cDNA sequence. Fragments typically are at least 5, 6, 8 or 10 amino acids long, in some embodiments, at least 14 amino acids long, in some embodiments, at least 20 amino acids long, usually at least 50 amino acids long, and in some embodiments, at least 70 amino acids long. The term “analog” as used herein refers to polypeptides that are comprised of a segment of at least 25 amino acids that has substantial identity to a portion of a deduced amino acid sequence and that has specific binding to the target, under suitable binding conditions. Typically, polypeptide analogs comprise a conservative amino acid substitution (or addition or deletion) with respect to the naturally-occurring sequence. Analogs typically are at least 20 amino acids long, in some embodiments, at least 50 amino acids long or longer, and can often be as long as a full-length naturally-occurring polypeptide.

[0461] The term “agent” is used herein to denote a chemical compound, a mixture of chemical compounds, a biological macromolecule, or an extract made from biological materials.

[0462] As used herein, the terms “label” or “labeled” refers to incorporation of a detectable marker, e.g., by incorporation of a radiolabeled amino acid or attachment to a polypeptide of biotinyl moieties that can be detected by marked avidin (e.g., streptavidin containing a fluorescent marker or enzymatic activity that can be detected by optical or calorimetric methods). In certain situations, the label or marker can also be therapeutic. Various methods of labeling polypeptides and glycoproteins are known in the art and may be used. Examples of labels for polypeptides include, but are not limited to, the following: radioisotopes or radionuclides (e.g., ³H, ¹⁴C, ¹⁵N, ³⁵S, ⁹⁰Y, ⁹⁹Tc, ¹¹¹In, ¹²⁵I, ¹³¹I), fluorescent labels (e.g., FITC, rhodamine, lanthanide phosphors), enzymatic labels (e.g., horseradish peroxidase, p-galactosidase, luciferase, alkaline phosphatase), chemiluminescent, biotinyl groups, predetermined polypeptide epitopes recognized by a secondary reporter (e.g., leucine zipper pair sequences, binding sites for secondary antibodies, metal binding domains, epitope tags). In some embodiments, labels are attached by spacer arms of various lengths to reduce potential steric hindrance. The term “pharmaceutical agent or drug” as used herein refers to a chemical compound or composition capable of inducing a desired therapeutic effect when properly administered to a patient.

[0463] Other chemistry terms herein are used according to conventional usage in the art, as exemplified by The McGraw-Hill Dictionary of Chemical Terms (Parker, S., Ed., McGraw-Hill, San Francisco (1985)).

[0464] As used herein, “substantially pure” means an object species is the predominant species present (i.e., on a molar basis it is more abundant than any other individual species in the composition), and in some embodiments, a substantially purified fraction is a composition wherein the object species comprises at least about 50 percent (on a molar basis) of all macromolecular species present.

[0465] Generally, a substantially pure composition will comprise more than about 80 percent of all macromolecular species present in the composition, in some embodiments, more than about 85%, 90%, 95%, and 99%. In some embodiments, the object species is purified to essential homogeneity (contaminant species cannot be detected in the composition by conventional detection methods) wherein the composition consists essentially of a single macromolecular species.

[0466] The term patient includes human and veterinary subjects.

[0467] Antibodies and/or activatable antibodies of the disclosure specifically bind a given target, e.g., a human target protein such as human PDL1. Also included in the disclosure are antibodies and/or activatable antibodies that bind to the same epitope as the antibodies and/or activatable antibodies described herein. Also included in the disclosure are antibodies and/or antibodies activatable antibodies that compete with an anti-PDL1 antibody and/or an anti-PDL activatable antibody described herein for binding to PDL1, e.g., human PDL1. Also included in the disclosure are antibodies and/or antibodies activatable antibodies that cross-compete with an anti-PDL1 antibody and/or an anti-PDL1 activatable antibody described herein for binding to PDL1, e.g., human PDL1.

[0468] Those skilled in the art will recognize that it is possible to determine, without undue experimentation, if a monoclonal antibody (e.g., a murine monoclonal or humanized antibody) has the same specificity as a monoclonal antibody used in the methods described herein by ascertaining whether the former prevents the latter from binding to the target. If the monoclonal antibody being tested competes with the monoclonal antibody of the disclosure, as shown by a decrease in binding by the monoclonal antibody of the disclosure, then the two monoclonal antibodies bind to the same, or a closely related, epitope. An alternative method for determining whether a monoclonal antibody has the specificity of a monoclonal antibody of the disclosure is to pre-incubate the monoclonal antibody of the disclosure with the target and then add the monoclonal antibody being tested to determine if the monoclonal antibody being tested is inhibited in its ability to bind the target. If the monoclonal antibody being tested is inhibited then, in all likelihood, it has the same, or functionally equivalent, epitopic specificity as the monoclonal antibody of the disclosure.

[0469] Multispecific Activatable Antibodies

[0470] The disclosure also provides multispecific anti-PDL1 activatable antibodies. The multispecific activatable antibodies provided herein are multispecific antibodies that recognize PDL1 and at least one or more different antigens or epitopes and that include at least one masking moiety (MM) linked to at least one antigen- or epitope-binding domain of the multispecific antibody such that coupling of the MM reduces the ability of the antigen- or epitope-binding domain to bind its target. In some embodiments, the MM is coupled to the antigen- or epitope-binding domain of the multispecific antibody via a cleavable moiety (CM) that functions as a substrate for at least one protease. The activatable multispecific antibodies provided herein are stable in circulation, activated at intended sites of therapy and/or diagnosis but not in normal, i.e., healthy tissue, and, when activated, exhibit binding to a target that is at least comparable to the corresponding, unmodified multispecific antibody.

[0471] In some embodiments, the multispecific activatable antibodies are designed to engage immune effector cells, also referred to herein as immune-effector cell engaging multispecific activatable antibodies. In some embodiments, the multispecific activatable antibodies are designed to engage leukocytes, also referred to herein as leukocyte engaging multispecific activatable antibodies. In some embodiments, the multispecific activatable antibodies are designed to engage T cells, also referred to herein as T-cell engaging multispecific activatable antibodies. In some embodiments, the multispecific activatable antibodies engage a surface antigen on a leukocyte, such as on a T cell, on a natural killer (NK) cell, on a myeloid mononuclear cell, on a macrophage, and/or on another immune effector cell. In some embodiments, the immune effector cell is a leukocyte. In some embodiments, the immune effector cell is a T cell. In some embodiments, the immune effector cell is a NK cell. In some embodiments, the immune effector cell is a mononuclear cell, such as a myeloid mononuclear cell. In some embodiments, the multispecific activatable antibodies are designed to bind or otherwise interact with more than one target and/or more than one epitope, also referred to herein as multi-antigen targeting activatable antibodies. As used herein, the terms “target” and “antigen” are used interchangeably.

[0472] In some embodiments, immune effector cell engaging multispecific activatable antibodies of the disclosure include a targeting antibody or antigen-binding fragment thereof that binds PDL1 and an immune effector cell engaging antibody or antigen-binding portion thereof, where at least one of the targeting antibody or antigen-binding fragment thereof and/or the immune effector cell engaging antibody or antigen-binding portion thereof is masked. In some embodiments, the immune effector cell engaging antibody or antigen binding fragment thereof includes a first antibody or antigen-binding fragment thereof (AB1) that binds a first, immune effector cell engaging target, where the AB1 is attached to a masking moiety (MM1) such that coupling of the MM1 reduces the ability of the AB1 to bind the first target. In some embodiments, the targeting antibody or antigen-binding fragment thereof includes a second antibody or fragment thereof that includes a second antibody or antigen-binding fragment thereof (AB2) that binds PDL1, where the AB2 is attached to a masking moiety (MM2) such that coupling of the MM2 reduces the ability of the AB2 to bind PDL1. In some embodiments, the immune effector cell engaging antibody or antigen binding fragment thereof includes a first antibody or antigen-binding fragment thereof (AB1) that binds a first, immune effector cell engaging target, where the AB1 is attached to a masking moiety (MM1) such that coupling of the MM1 reduces the ability of the AB1 to bind the first target, and the targeting antibody or antigen-binding fragment thereof includes a second antibody or fragment thereof that includes a second antibody or antigen-binding fragment thereof (AB2) that binds PDL1, where the AB2 is attached to a masking moiety (MM2) such that coupling of the MM2 reduces the ability of the AB2 to bind PDL1. In some embodiments, the non-immune effector cell engaging antibody is a cancer targeting antibody. In some embodiments the non-immune cell effector antibody is an IgG. In some embodiments the immune effector cell engaging antibody is a scFv. In some embodiments the PDL1-targeting antibody (e.g., non-immune cell effector antibody) is an IgG and the immune effector cell engaging antibody is a scFv. In some embodiments, the immune effector cell is a leukocyte. In some embodiments, the immune effector cell is a T cell. In some embodiments, the immune effector cell is a NK cell. In some embodiments, the immune effector cell is a myeloid mononuclear cell.

[0473] In some embodiments, T-cell engaging multispecific activatable antibodies of the disclosure include a PDL1-targeting antibody or antigen-binding fragment thereof and a T-cell engaging antibody or antigen-binding portion thereof, where at least one of the PDL1-targeting antibody or antigen-binding fragment thereof and/or the T-cell engaging antibody or antigen-binding portion thereof is masked. In some embodiments, the T-cell engaging antibody or antigen binding fragment thereof includes a first antibody or antigen-binding fragment thereof (AB1) that binds a first, T-cell engaging target, where the AB1 is attached to a masking moiety (MM1) such that coupling of the MM1 reduces the ability of the AB1 to bind the first target. In some embodiments, the targeting antibody or antigen-binding fragment thereof includes a second antibody or fragment thereof that includes a second antibody or antigen-binding fragment thereof (AB2) that binds PDL1, where the AB2 is attached to a masking moiety (MM2) such that coupling of the MM2 reduces the ability of the AB2 to bind PDL1. In some embodiments, the T-cell engaging antibody or antigen binding fragment thereof includes a first antibody or antigen-binding fragment thereof (AB1) that binds a first, T-cell engaging target, where the AB1 is attached to a masking moiety (MM1) such that coupling of the MM1 reduces the ability of the AB1 to bind the first target, and the targeting antibody or antigen-binding fragment thereof includes a second antibody or fragment thereof that includes a second antibody or antigen-binding fragment thereof (AB2) that binds PDL1, where the AB2 is attached to a masking moiety (MM2) such that coupling of the MM2 reduces the ability of the AB2 to bind PDL1.

[0474] In some embodiments of an immune effector cell engaging multispecific activatable antibody, one antigen is PDL1, and another antigen is typically a stimulatory or inhibitory receptor present on the surface of a T-cell, natural killer (NK) cell, myeloid mononuclear cell, macrophage, and/or other immune effector cell, such as, but not limited to, B7-H4, BTLA, CD3, CD4, CD8, CD16a, CD25, CD27, CD28, CD32, CD56, CD137, CTLA-4, GITR, HVEM, ICOS, LAG3, NKG2D, OX40, PD1, TIGIT, TIM3, or VISTA. In some embodiments, the antigen is a stimulatory receptor present on the surface of a T cell or NK cell; examples of such stimulatory receptors include, but are not limited to, CD3, CD27, CD28, CD137 (also referred to as 4-1BB), GITR, HVEM, ICOS, NKG2D, and OX40. In some embodiments, the antigen is an inhibitory receptor present on the surface of a T-cell; examples of such inhibitory receptors include, but are not limited to, BTLA, CTLA-4, LAG3, PD1, TIGIT, TIM3, and NK-expressed KIRs. The antibody domain conferring specificity to the T-cell surface antigen may also be substituted by a ligand or ligand domain that binds to a T-cell receptor, a NK-cell receptor, a macrophage receptor, and/or other immune effector cell receptor, such as, but not limited to, B7-1, B7-2, B7H3, PDL1, PDL2, or TNFSF9.

[0475] In some embodiments, the T-cell engaging multispecific activatable antibody includes an anti-CD3 epsilon (CD3ε, also referred to herein as CD3ε and CD3) scFv and a targeting antibody or antigen-binding fragment thereof, where at least one of the anti-CD3ε scFv and/or the targeting antibody or antigen-binding portion thereof is masked. In some embodiments, the CD3ε scFv includes a first antibody or antigen-binding fragment thereof (AB1) that binds CD3ε, where the AB1 is attached to a masking moiety (MM1) such that coupling of the MM1 reduces the ability of the AB1 to bind CD3ε. In some embodiments, the targeting antibody or antigen-binding fragment thereof includes a second antibody or fragment thereof that includes a second antibody or antigen-binding fragment thereof (AB2) that binds PDL1, where the AB2 is attached to a masking moiety (MM2) such that coupling of the MM2 reduces the ability of the AB2 to bind PDL1. In some embodiments, the CD3ε scFv includes a first antibody or antigen-binding fragment thereof (AB1) that binds CD3ε, where the AB1 is attached to a masking moiety (MM1) such that coupling of the MM1 reduces the ability of the AB1 to bind CD3ε, and the targeting antibody or antigen-binding fragment thereof includes a second antibody or fragment thereof that includes a second antibody or antigen-binding fragment thereof (AB2) that binds PDL1, where the AB2 is attached to a masking moiety (MM2) such that coupling of the MM2 reduces the ability of the AB2 to bind PDL1.

[0476] In some embodiments, the multi-antigen targeting antibodies and/or multi-antigen targeting activatable antibodies include at least a first antibody or antigen-binding fragment thereof that binds a first target and/or first epitope and a second antibody or antigen-binding fragment thereof that binds a second target and/or a second epitope. In some embodiments, the multi-antigen targeting antibodies and/or multi-antigen targeting activatable antibodies bind two or more different targets. In some embodiments, the multi-antigen targeting antibodies and/or multi-antigen targeting activatable antibodies bind two or more different epitopes on the same target. In some embodiments, the multi-antigen targeting antibodies and/or multi-antigen targeting activatable antibodies bind a combination of two or more different targets and two or more different epitopes on the same target.

[0477] In some embodiments, a multispecific activatable antibody comprising an IgG has the IgG variable domains masked. In some embodiments, a multispecific activatable antibody comprising a scFv has the scFv domains masked. In some embodiments, a multispecific activatable antibody has both IgG variable domains and scFv domains, where at least one of the IgG variable domains is coupled to a masking moiety. In some embodiments, a multispecific activatable antibody has both IgG variable domains and scFv domains, where at least one of the scFv domains is coupled to a masking moiety. In some embodiments, a multispecific activatable antibody has both IgG variable domains and scFv domains, where at least one of the IgG variable domains is coupled to a masking moiety and at least one of the scFv domains is coupled to a masking moiety. In some embodiments, a multispecific activatable antibody has both IgG variable domains and scFv domains, where each of the IgG variable domains and the scFv domains is coupled to its own masking moiety. In some embodiments, one antibody domain of a multispecific activatable antibody has specificity for a target antigen and another antibody domain has specificity for a T-cell surface antigen. In some embodiments, one antibody domain of a multispecific activatable antibody has specificity for a target antigen and another antibody domain has specificity for another target antigen. In some embodiments, one antibody domain of a multispecific activatable antibody has specificity for an epitope of a target antigen and another antibody domain has specificity for another epitope of the target antigen.

[0478] In a multispecific activatable antibody, a scFv can be fused to the carboxyl terminus of the heavy chain of an IgG activatable antibody, to the carboxyl terminus of the light chain of an IgG activatable antibody, or to the carboxyl termini of both the heavy and light chains of an IgG activatable antibody. In a multispecific activatable antibody, a scFv can be fused to the amino terminus of the heavy chain of an IgG activatable antibody, to the amino terminus of the light chain of an IgG activatable antibody, or to the amino termini of both the heavy and light chains of an IgG activatable antibody. In a multispecific activatable antibody, a scFv can be fused to any combination of one or more carboxyl termini and one or more amino termini of an IgG activatable antibody. In some embodiments, a masking moiety (MM) linked to a cleavable moiety (CM) is attached to and masks an antigen binding domain of the IgG. In some embodiments, a masking moiety (MM) linked to a cleavable moiety (CM) is attached to and masks an antigen binding domain of at least one scFv. In some embodiments, a masking moiety (MM) linked to a cleavable moiety (CM) is attached to and masks an antigen binding domain of an IgG and a masking moiety (MM) linked to a cleavable moiety (CM) is attached to and masks an antigen binding domain of at least one scFv.

[0479] The disclosure provides examples of multi specific activatable antibody structures which include, but are not limited to, the following: (VL-CL)₂:(VH-CH1-CH2-CH3-L4-VH*-L3-VL*-L2-CM-L1-MM)₂; (VL-CL)₂:(VH-CH1-CH2-CH3-L4-VL*-L3-VH*-L2-CM-L1-MM)₂; (MM-L1-CM-L2-VL-CL)₂:(VH-CH1-CH2-CH3-L4-VH*-L3-VL*)₂ (MM-L1-CM-L2-VL-CL)₂:(VH-CH1-CH2-CH3-L4-VL*-L3-VH*)₂; (VL-CL)₂:(MM-L1-CM-L2-VL*-L3-VH*-L4-VH-CH1-CH2-CH3)₂; (VL-CL)₂:(MM-L1-CM-L2-VH*-L3-VL*-L4-VH-CH1-CH2-CH3)₂; (MM-L1-CM-L2-VL-CL)₂:(VL*-L3-VH*-L4-VH-CH1-CH2-CH3)₂; (MM-L1-CM-L2-VL-CL)₂:(VH*-L3-VL*-L4-VH-CH1-CH2-CH3)₂; (VL-CL-L4-VH*-L3-VL*-L2-CM-L1-MM)₂:(VH-CH1-CH2-CH3)₂; (VL-CL-L4-VL*-L3-VH*-L2-CM-L1-MM)₂:(VH-CH1-CH2-CH3)₂; (MM-L1-CM-L2-VL*-L3-VH*-L4-VL-CL)₂:(VH-CH1-CH2-CH3)₂; (MM-L1-CM-L2-VH*-L3-VL*-L4-VL-CL)₂:(VH-CH1-CH2-CH3)₂; (VL-CL-L4-VH*-L3-VL*-L2-CM-L1-MM)₂: (MM-L-CM-L2-VL*-L3-VH*-L4-VH-CH1-CH2-CH3)₂; (VL-CL-L4-VH*-L3-VL*-L2-CM-L1-MM)₂: (MM-L1-CM-L2-VH*-L3-VL*-L4-VH-CH1-CH2-CH3)₂; (VL-CL-L4-VL*-L3-VH*-L2-CM-L1-MM)₂: (MM-L1-CM-L2-VL*-L3-VH*-L4-VH-CH1-CH2-CH3)₂; (VL-CL-L4-VL*-L3-VH*-L2-CM-L1-MM)₂: (MM-L1-CM-L2-VH*-L3-VL*-L4-VH-CH1-CH2-CH3)₂; (VL-CL-L4-VH*-L3-VL*)₂: (MM-L1-CM-L2-VL*-L3-VH*-L4-VH-CH1-CH2-CH3)₂; (VL-CL-L4-VH*-L3-VL*)₂: (MM-L1-CM-L2-VH*-L3-VL*-L4-VH-CH1-CH2-CH3)₂; (VL-CL-L4-VL*-L3-VH*)₂: (MM-L-CM-L2-VL*-L3-VH*-L4-VH-CH1-CH2-CH3)₂; (VL-CL-L4-VL*-L3-VH*)₂: (MM-L1-CM-L2-VH*-L3-VL*-L4-VH-CH1-CH2-CH3)₂; (VL-CL-L4-VH*-L3-VL*-L2-CM-L1-MM)₂: (VL*-L3-VH*-L4-VH-CH1-CH2-CH3)₂, (VL-CL-L4-VH*-L3-VL*-L2-CM-L1-MM)₂: (VH*-L3-VL*-L4-VH-CH1-CH2-CH3)₂; (VL-CL-L4-VL*-L3-VH*-L2-CM-L1-MM)₂: (VL*-L3-VH*-L4-VH-CH1-CH2-CH3)₂; or (VL-CL-L4-VL*-L3-V1H*-L2-CM-L1-MM)₂: (VH*-L3-VL*-L4-VH-CH1-CH2-CH3)₂, wherein: VL and VH represent the light and heavy variable domains of the first specificity, contained in the IgG; VL* and VH* represent the variable domains of the second specificity, contained in the scFv; L1 is a linker peptide connecting the masking moiety (MM) and the cleavable moiety (CM); L2 is a linker peptide connecting the cleavable moiety (CM), and the antibody; L3 is a linker peptide connecting the variable domains of the scFv; L4 is a linker peptide connecting the antibody of the first specificity to the antibody of the second specificity; CL is the light-chain constant domain; and CH1, CH2, CH3 are the heavy chain constant domains. The first and second specificities may be toward any antigen or epitope.

[0480] In some embodiments of a T-cell engaging multispecific activatable antibody, one antigen is PDL1, and another antigen is typically a stimulatory (also referred to herein as activating) or inhibitory receptor present on the surface of a T-cell, natural killer (NK) cell, myeloid mononuclear cell, macrophage, and/or other immune effector cell, such as, but not limited to, B7-H4, BTLA, CD3, CD4, CD8, CD16a, CD25, CD27, CD28, CD32, CD56, CD137 (also referred to as TNFRSF9), CTLA-4, GITR, HVEM, ICOS, LAG3, NKG2D, OX40, PD1, TIGIT, TIM3, or VISTA. The antibody domain conferring specificity to the T-cell surface antigen may also be substituted by a ligand or ligand domain that binds to a T-cell receptor, a NK-cell receptor, a macrophage receptor, and/or other immune effector cell receptor, such as, but not limited to, PDL1.

[0481] In some embodiments, the targeting antibody is an anti-PDL1 antibody disclosed herein. In some embodiments, the targeting antibody can be in the form an activatable antibody. In some embodiments, the scFv(s) can be in the form of a Pro-scFv (see, e.g., WO 2009/025846, WO 2010/081173).

[0482] In some embodiments, the scFv is specific for binding CD3ε, and comprises or is derived from an antibody or fragment thereof that binds CD3ε, e.g., CH2527, FN18, H2C, OKT3, 2C11, UCHT1, or V9. In some embodiments, the scFv is specific for binding CTLA-4 (also referred to herein as CTLA and CTLA4).

[0483] In some embodiments, the anti-CTLA-4 scFv includes the amino acid sequence:

(SEQ ID NO: 424)
GGGSGGGGSGSGGGSGGGGSGGGEIVLTQSPGTLSLSPGERATLSCRASQ
SVSSSYLAWYQQKPGQAPRLLIYGASSRATGIPDRFSGSGSGTDFTLTIS
RLEPEDFAVYYCQQYGSSPLTFGGGTKVEIKRSGGSTITSYNVYYTKLSS
SGTQVQLVQTGGGVVQPGRSLRLSCAASGSTFSSYAMSWVRQAPGKGLEW
VSAISGSGGSTYYADSVKGRFTISRDNSKNTLYLQMNSLRAEDTAVYYCA
TNSLYWYFDLWGRGTLVTVSSAS

[0484] In some embodiments, the anti-CTLA-4 scFv includes the amino acid sequence that is at least 90%, 91%, 92%, 93%, 94%, 95%, 96%, 97%, 98%, 99% or more identical to the amino acid sequence of SEQ ID NO: 424.

[0485] In some embodiments, the anti-CD38 scFv includes the amino acid sequence:

(SEQ ID NO: 425)
GGGSGGGGSGSGGGSGGGGSGGGQVQLQQSGAELARPGASVKMSCKASGY
TFTRYTMHWVKQRPGQGLEWIGYINPSRGYTNYNQKFKDKATLTTDKSSS
TAYMQLSSLTSEDSAVYYCARYYDDHYCLDYWGQGTTLTVSSGGGGSGGG
GSGGGGSQIVLTQSPAIMSASPGEKVTMTCSASSSVSYMNWYQQKSGTSP
KRWIYDTSKLASGVPAHFRGSGSGTSYSLTISGMEAEDAATYYCQQWSSN
PFTFGSGTKLEINR

[0486] In some embodiments, the anti-CD3 scFv includes the amino acid sequence that is at least 90%, 91%, 92%, 93%, 94%, 95%, 96%, 97%, 98%, 99% or more identical to the amino acid sequence of SEQ ID NO: 425.

[0487] In some embodiments, the scFv is specific for binding one or more T-cells, one or more NK-cells and/or one or more macrophages. In some embodiments, the scFv is specific for binding a target selected from the group consisting of B7-H4, BTLA, CD3, CD4, CD8, CD16a, CD25, CD27, CD28, CD32, CD56, CD137, CTLA-4, GITR, HVEM, ICOS, LAG3, NKG2D, OX40, PD1, TIGIT, TIM3, or VISTA.

[0488] In some embodiments, the multispecific activatable antibody also includes an agent conjugated to the AB. In some embodiments, the agent is a therapeutic agent. In some embodiments, the agent is an antineoplastic agent. In some embodiments, the agent is a toxin or fragment thereof. In some embodiments, the agent is conjugated to the multispecific activatable antibody via a linker. In some embodiments, the agent is conjugated to the AB via a cleavable linker. In some embodiments, the linker is a non-cleavable linker. In some embodiments, the agent is a microtubule inhibitor. In some embodiments, the agent is a nucleic acid damaging agent, such as a DNA alkylator or DNA intercalator, or other DNA damaging agent. In some embodiments, the linker is a cleavable linker. In some embodiments, the agent is an agent selected from the group listed in Table 11. In some embodiments, the agent is a dolastatin. In some embodiments, the agent is an auristatin or derivative thereof. In some embodiments, the agent is auristatin E or a derivative thereof. In some embodiments, the agent is monomethyl auristatin E (MMAE). In some embodiments, the agent is monomethyl auristatin D (MMAD). In some embodiments, the agent is a maytansinoid or maytansinoid derivative. In some embodiments, the agent is DM1 or DM4. In some embodiments, the agent is a duocarmycin or derivative thereof. In some embodiments, the agent is a calicheamicin or derivative thereof. In some embodiments, the agent is a pyrrolobenzodiazepine. In some embodiments, the agent is a pyrrolobenzodiazepine dimer.

[0489] In some embodiments, the multispecific activatable antibody also includes a detectable moiety. In some embodiments, the detectable moiety is a diagnostic agent.

[0490] In some embodiments, the multispecific activatable antibody naturally contains one or more disulfide bonds. In some embodiments, the multispecific activatable antibody can be engineered to include one or more disulfide bonds.

[0491] The disclosure also provides an isolated nucleic acid molecule encoding a multispecific activatable antibody described herein, as well as vectors that include these isolated nucleic acid sequences. The disclosure provides methods of producing a multispecific activatable antibody by culturing a cell under conditions that lead to expression of the activatable antibody, wherein the cell comprises such a nucleic acid molecule. In some embodiments, the cell comprises such a vector.

[0492] The disclosure also provides a method of manufacturing multispecific activatable antibodies of the disclosure by (a) culturing a cell comprising a nucleic acid construct that encodes the multispecific activatable antibody under conditions that lead to expression of the multispecific activatable, and (b) recovering the multispecific activatable antibody. Suitable AB, MM, and/or CM include any of the AB, MM, and/or CM disclosed herein.

[0493] The disclosure also provides multispecific activatable antibodies and/or multispecific activatable antibody compositions that include at least a first antibody or antigen-binding fragment thereof (AB1) that specifically binds a first target or first epitope and a second antibody or antigen-biding fragment thereof (AB2) that binds a second target or a second epitope, where at least AB1 is coupled or otherwise attached to a masking moiety (MM1), such that coupling of the MM1 reduces the ability of AB1 to bind its target. In some embodiments, the MM1 is coupled to AB1 via a first cleavable moiety (CM1) sequence that includes a substrate for a protease, for example, a protease that is co-localized with the target of AB1 at a treatment site or a diagnostic site in a subject. The multispecific activatable antibodies provided herein are stable in circulation, activated at intended sites of therapy and/or diagnosis but not in normal, i.e., healthy tissue, and, when activated, exhibit binding to the target of AB1 that is at least comparable to the corresponding, unmodified multispecific antibody. Suitable AB, MM, and/or CM include any of the AB, MM, and/or CM disclosed herein.

[0494] The disclosure also provides compositions and methods that include a multispecific activatable antibody that includes at least a first antibody or antibody fragment (AB1) that specifically binds a target and a second antibody or antibody fragment (AB2), where at least the first AB in the multispecific activatable antibody is coupled to a masking moiety (MM1) that decreases the ability of AB1 to bind its target. In some embodiments, each AB is coupled to a MM that decreases the ability of its corresponding AB to each target. For example, in bispecific activatable antibody embodiments, AB1 is coupled to a first masking moiety (MM1) that decreases the ability of AB1 to bind its target, and AB2 is coupled to a second masking moiety (MM2) that decreases the ability of AB2 to bind its target. In some embodiments, the multispecific activatable antibody comprises more than two AB regions; in such embodiments, AB1 is coupled to a first masking moiety (MM1) that decreases the ability of AB1 to bind its target, AB2 is coupled to a second masking moiety (MM2) that decreases the ability of AB2 to bind its target, AB3 is coupled to a third masking moiety (MM3) that decreases the ability of AB3 to bind its target, and so on for each AB in the multispecific activatable antibody. Suitable AB, MM, and/or CM include any of the AB, MM, and/or CM disclosed herein.

[0495] In some embodiments, the multispecific activatable antibody further includes at least one cleavable moiety (CM) that is a substrate for a protease, where the CM links a MM to an AB. For example, in some embodiments, the multispecific activatable antibody includes at least a first antibody or antibody fragment (AB1) that specifically binds a target and a second antibody or antibody fragment (AB2), where at least the first AB in the multispecific activatable antibody is coupled via a first cleavable moiety (CM1) to a masking moiety (MM1) that decreases the ability of AB1 to bind its target. In some bispecific activatable antibody embodiments, AB1 is coupled via CM1 to MM1, and AB2 is coupled via a second cleavable moiety (CM2) to a second masking moiety (MM2) that decreases the ability of AB2 to bind its target. In some embodiments, the multispecific activatable antibody comprises more than two AB regions; in some of these embodiments, AB1 is coupled via CM1 to MM1, AB2 is coupled via CM2 to MM2, and AB3 is coupled via a third cleavable moiety (CM3) to a third masking moiety (MM3) that decreases the ability of AB3 to bind its target, and so on for each AB in the multispecific activatable antibody. Suitable AB, MM, and/or CM include any of the AB, MM, and/or CM disclosed herein.

[0496] Activatable Antibodies Having Non-Binding Steric Moieties or Binding Partners for Non-Binding Steric Moieties

[0497] The disclosure also provides activatable antibodies that include non-binding steric moieties (NB) or binding partners (BP) for non-binding steric moieties, where the BP recruits or otherwise attracts the NB to the activatable antibody. The activatable antibodies provided herein include, for example, an activatable antibody that includes a non-binding steric moiety (NB), a cleavable linker (CL) and antibody or antibody fragment (AB) that binds a target; an activatable antibody that includes a binding partner for a non-binding steric moiety (BP), a CL and an AB; and an activatable antibody that includes a BP to which an NB has been recruited, a CL and an AB that binds the target. Activatable antibodies in which the NB is covalently linked to the CL and AB of the activatable antibody or is associated by interaction with a BP that is covalently linked to the CL and AB of the activatable antibody are referred to herein as “NB-containing activatable antibodies.” By activatable or switchable is meant that the activatable antibody exhibits a first level of binding to a target when the activatable antibody is in an inhibited, masked or uncleaved state (i.e., a first conformation), and a second level of binding to the target when the activatable antibody is in an uninhibited, unmasked and/or cleaved state (i.e., a second conformation, i.e., activated antibody), where the second level of target binding is greater than the first level of target binding. The activatable antibody compositions can exhibit increased bioavailability and more favorable biodistribution compared to conventional antibody therapeutics.

[0498] In some embodiments, activatable antibodies provide for reduced toxicity and/or adverse side effects that could otherwise result from binding of the at non-treatment sites and/or non-diagnostic sites if the AB were not masked or otherwise inhibited from binding to such a site.

[0499] Anti-PDL1 activatable antibodies that include a non-binding steric moiety (NB) can be made using the methods set forth in PCT Publication No. WO 2013/192546, the contents of which are hereby incorporated by reference in their entirety.

[0500] Use of Antibodies, Conjugated Antibodies, Activatable Antibodies, and Conjugated Activatable Antibodies

[0501] It will be appreciated that administration of therapeutic entities in accordance with the disclosure will be administered with suitable carriers, excipients, and other agents that are incorporated into formulations to provide improved transfer, delivery, tolerance, and the like. A multitude of appropriate formulations can be found in the formulary known to all pharmaceutical chemists: Remington's Pharmaceutical Sciences (15th ed, Mack Publishing Company, Easton, Pa. (1975)), particularly Chapter 87 by Blaug, Seymour, therein. These formulations include, for example, powders, pastes, ointments, jellies, waxes, oils, lipids, lipid (cationic or anionic) containing vesicles (such as Lipofectin), DNA conjugates, anhydrous absorption pastes, oil-in-water and water-in-oil emulsions, emulsions carbowax (polyethylene glycols of various molecular weights), semi-solid gels, and semi-solid mixtures containing carbowax. Any of the foregoing mixtures may be appropriate in treatments and therapies in accordance with the present disclosure, provided that the active ingredient in the formulation is not inactivated by the formulation and the formulation is physiologically compatible and tolerable with the route of administration. See also Baldrick P. “Pharmaceutical excipient development: the need for preclinical guidance.” Regul. Toxicol Pharmacol. 32(2):210-8 (2000), Wang W. “Lyophilization and development of solid protein pharmaceuticals.” Int. J. Pharm. 203(1-2): 1-60 (2000), Charman W N “Lipids, lipophilic drugs, and oral drug delivery-some emerging concepts.” J Pharm Sci. 89(8):967-78 (2000), Powell et al. “Compendium of excipients for parenteral formulations” PDA J Pharm Sci Technol. 52:238-311 (1998) and the citations therein for additional information related to formulations, excipients and carriers well known to pharmaceutical chemists.

[0502] Therapeutic formulations of the disclosure, which include an anti-PDL1 antibody and/or activatable anti-PDL1 antibody, such as by way of non-limiting example, an antibody, a conjugated antibody, an activatable antibody and/or a conjugated activatable antibody, are used to prevent, treat or otherwise ameliorate a disease or disorder associated with aberrant target expression and/or activity. For example, therapeutic formulations of the disclosure, which include an antibody, a conjugated antibody, an activatable antibody and/or a conjugated activatable antibody, are used to treat or otherwise ameliorate a cancer or other neoplastic condition, inflammation, an inflammatory disorder, and/or an autoimmune disease. In some embodiments, the cancer is a solid tumor or a hematologic malignancy where the target is expressed. In some embodiments, the cancer is a solid tumor where the target is expressed. In some embodiments, the cancer is a hematologic malignancy where the target is expressed. In some embodiments, the target is expressed on parenchyma (e.g., in cancer, the portion of an organ or tissue that often carries out function(s) of the organ or tissue). In some embodiments, the target is expressed on a cell, tissue, or organ. In some embodiments, the target is expressed on stroma (i.e., the connective supportive framework of a cell, tissue, or organ). In some embodiments, the target is expressed on an osteoblast. In some embodiments, the target is expressed on the endothelium (vasculature). In some embodiments, the target is expressed on a cancer stem cell. In some embodiments, the agent to which the antibody and/or the activatable antibody is conjugated is a microtubule inhibitor. In some embodiments, the agent to which the antibody and/or the activatable antibody is conjugated is a nucleic acid damaging agent.

[0503] Efficaciousness of prevention, amelioration or treatment is determined in association with any known method for diagnosing or treating the disease or disorder associated with target expression and/or activity, such as, for example, aberrant target expression and/or activity. Prolonging the survival of a subject or otherwise delaying the progression of the disease or disorder associated with target expression and/or activity, e.g., aberrant target expression and/or activity, in a subject indicates that the antibody, conjugated antibody, activatable antibody and/or conjugated activatable antibody confers a clinical benefit.

[0504] An antibody, a conjugated antibody, an activatable antibody and/or a conjugated activatable antibody can be administered in the form of pharmaceutical compositions. Principles and considerations involved in preparing such compositions, as well as guidance in the choice of components are provided, for example, in Remington: The Science And Practice Of Pharmacy 19th ed. (Alfonso R. Gennaro, et al., editors) Mack Pub. Co., Easton, Pa.: 1995; Drug Absorption Enhancement: Concepts, Possibilities, Limitations, And Trends, Harwood Academic Publishers, Langhorne, Pa., 1994; and Peptide And Protein Drug Delivery (Advances In Parenteral Sciences, Vol. 4), 1991, M. Dekker, New York.

[0505] In some embodiments where antibody fragments are used, the smallest fragment that specifically binds to the binding domain of the target protein is selected. For example, based upon the variable-region sequences of an antibody, peptide molecules can be designed that retain the ability to bind the target protein sequence. Such peptides can be synthesized chemically and/or produced by recombinant DNA technology. (See, e.g., Marasco et al., Proc. Natl. Acad. Sci. USA, 90: 7889-7893 (1993)). The formulation can also contain more than one active compounds as necessary for the particular indication being treated, for example, in some embodiments, those with complementary activities that do not adversely affect each other. In some embodiments, or in addition, the composition can comprise an agent that enhances its function, such as, for example, a cytotoxic agent, cytokine, chemotherapeutic agent, or growth-inhibitory agent. Such molecules are suitably present in combination in amounts that are effective for the purpose intended.

[0506] The active ingredients can also be entrapped in microcapsules prepared, for example, by coacervation techniques or by interfacial polymerization, for example, hydroxymethylcellulose or gelatin-microcapsules and poly-(methyl methacrylate) microcapsules, respectively, in colloidal drug delivery systems (for example, liposomes, albumin microspheres, microemulsions, nano-particles, and nanocapsules) or in macroemulsions.

[0507] The formulations to be used for in vivo administration must be sterile. This is readily accomplished by filtration through sterile filtration membranes.

[0508] Sustained-release preparations can be prepared. Suitable examples of sustained-release preparations include semipermeable matrices of solid hydrophobic polymers containing the antibody, which matrices are in the form of shaped articles, e.g., films, or microcapsules. Examples of sustained-release matrices include polyesters, hydrogels (for example, poly(2-hydroxyethyl-methacrylate), or poly(vinylalcohol)), polylactides (U.S. Pat. No. 3,773,919), copolymers of L-glutamic acid and γ ethyl-L-glutamate, non-degradable ethylene-vinyl acetate, degradable lactic acid-glycolic acid copolymers such as the LUPRON DEPOT™ (injectable microspheres composed of lactic acid-glycolic acid copolymer and leuprolide acetate), and poly-D-(−)-3-hydroxybutyric acid. While polymers such as ethylene-vinyl acetate and lactic acid-glycolic acid enable release of molecules for over 100 days, certain hydrogels release proteins for shorter time periods.

[0509] In some embodiments, the antibody, the conjugated antibody, activatable antibody and/or conjugated activatable antibody contains a detectable label. An intact antibody, or a fragment thereof (e.g., Fab, scFv, or F(ab)₂) is used. The term “labeled”, with regard to the probe or antibody, is intended to encompass direct labeling of the probe or antibody by coupling (i.e., physically linking) a detectable substance to the probe or antibody, as well as indirect labeling of the probe or antibody by reactivity with another reagent that is directly labeled. Examples of indirect labeling include detection of a primary antibody using a fluorescently-labeled secondary antibody and end-labeling of a DNA probe with biotin such that it can be detected with fluorescently-labeled streptavidin. The term “biological sample” is intended to include tissues, cells and biological fluids isolated from a subject, as well as tissues, cells and fluids present within a subject. Included within the usage of the term “biological sample”, therefore, is blood and a fraction or component of blood including blood serum, blood plasma, or lymph. That is, the detection method of the disclosure can be used to detect an analyte mRNA, protein, or genomic DNA in a biological sample in vitro as well as in vivo. For example, in vitro techniques for detection of an analyte mRNA include Northern hybridizations and in situ hybridizations. In vitro techniques for detection of an analyte protein include enzyme linked immunosorbent assays (ELISAs), Western blots, immunoprecipitations, immunochemical staining, and immunofluorescence. In vitro techniques for detection of an analyte genomic DNA include Southern hybridizations. Procedures for conducting immunoassays are described, for example in “ELISA: Theory and Practice: Methods in Molecular Biology”, Vol. 42, J. R. Crowther (Ed.) Human Press, Totowa, N.J., 1995; “Immunoassay”, E. Diamandis and T. Christopoulus, Academic Press, Inc., San Diego, Calif., 1996; and “Practice and Theory of Enzyme Immunoassays”, P. Tijssen, Elsevier Science Publishers, Amsterdam, 1985. Furthermore, in vivo techniques for detection of an analyte protein include introducing into a subject a labeled anti-analyte protein antibody. For example, the antibody can be labeled with a radioactive marker whose presence and location in a subject can be detected by standard imaging techniques.

[0510] The antibodies, conjugated antibodies, activatable antibodies and/or conjugated activatable antibodies of the disclosure are also useful in a variety of diagnostic and prophylactic formulations. In one embodiment, an antibody, a conjugated antibody, an activatable antibody and/or a conjugated activatable antibody is administered to patients that are at risk of developing one or more of the aforementioned disorders. A patient's or organ's predisposition to one or more of the aforementioned disorders can be determined using genotypic, serological or biochemical markers.

[0511] In some embodiments of the disclosure, an antibody, a conjugated antibody, an activatable antibody and/or a conjugated activatable antibody is administered to human individuals diagnosed with a clinical indication associated with one or more of the aforementioned disorders. Upon diagnosis, an antibody, a conjugated antibody, an activatable antibody and/or a conjugated activatable antibody is administered to mitigate or reverse the effects of the clinical indication.

[0512] An antibody, a conjugated antibody, an activatable antibody, and/or a conjugated activatable antibody of the disclosure is also useful in the detection of a target in patient samples and accordingly are useful as diagnostics. For example, the antibodies and/or activatable antibodies, and conjugated versions thereof, of the disclosure are used in in vitro assays, e.g., ELISA, to detect target levels in a patient sample.

[0513] In one embodiment, an antibody, a conjugated antibody, an activatable antibody and/or a conjugated activatable antibody of the disclosure is immobilized on a solid support (e.g., the well(s) of a microtiter plate). The immobilized antibody, conjugated antibody, activatable antibody and/or conjugated activatable antibody serves as a capture antibody for any target that may be present in a test sample. Prior to contacting the immobilized antibody and/or activatable antibody, and/or conjugated versions thereof, with a patient sample, the solid support is rinsed and treated with a blocking agent such as milk protein or albumin to prevent nonspecific adsorption of the analyte.

[0514] Subsequently the wells are treated with a test sample suspected of containing the antigen, or with a solution containing a standard amount of the antigen. Such a sample is, e.g., a serum sample from a subject suspected of having levels of circulating antigen considered to be diagnostic of a pathology. After rinsing away the test sample or standard, the solid support is treated with a second antibody that is detectably labeled. The labeled second antibody serves as a detecting antibody. The level of detectable label is measured, and the concentration of target antigen in the test sample is determined by comparison with a standard curve developed from the standard samples.

[0515] It will be appreciated that based on the results obtained using the antibodies and activatable antibodies of the disclosure, and conjugated versions thereof, in an in vitro diagnostic assay, it is possible to stage a disease in a subject based on expression levels of the target antigen. For a given disease, samples of blood are taken from subjects diagnosed as being at various stages in the progression of the disease, and/or at various points in the therapeutic treatment of the disease. Using a population of samples that provides statistically significant results for each stage of progression or therapy, a range of concentrations of the antigen that may be considered characteristic of each stage is designated.

[0516] An antibody, a conjugated antibody, an activatable antibody and/or a conjugated activatable antibody can also be used in diagnostic and/or imaging methods. In some embodiments, such methods are in vitro methods. In some embodiments, such methods are in vivo methods. In some embodiments, such methods are in situ methods. In some embodiments, such methods are ex vivo methods. For example, activatable antibodies having an enzymatically cleavable CM can be used to detect the presence or absence of an enzyme that is capable of cleaving the CM. Such activatable antibodies can be used in diagnostics, which can include in vivo detection (e.g., qualitative or quantitative) of enzyme activity (or, in some embodiments, an environment of increased reduction potential such as that which can provide for reduction of a disulfide bond) through measured accumulation of activated antibodies (i.e., antibodies resulting from cleavage of an activatable antibody) in a given cell or tissue of a given host organism. Such accumulation of activated antibodies indicates not only that the tissue expresses enzymatic activity (or an increased reduction potential depending on the nature of the CM) but also that the tissue expresses target to which the activated antibody binds.

[0517] For example, the CM can be selected to be substrate for at least one protease found at the site of a tumor, at the site of a viral or bacterial infection at a biologically confined site (e.g., such as in an abscess, in an organ, and the like), and the like. The AB can be one that binds a target antigen. Using methods as disclosed herein, or when appropriate, methods familiar to one skilled in the art, a detectable label (e.g., a fluorescent label or radioactive label or radiotracer) can be conjugated to an AB or other region of an antibody and/or activatable antibody. Suitable detectable labels are discussed in the context of the above screening methods and additional specific examples are provided below. Using an AB specific to a protein or peptide of the disease state, along with at least one protease whose activity is elevated in the disease tissue of interest, activatable antibodies will exhibit an increased rate of binding to disease tissue relative to tissues where the CM specific enzyme is not present at a detectable level or is present at a lower level than in disease tissue or is inactive (e.g., in zymogen form or in complex with an inhibitor). Since small proteins and peptides are rapidly cleared from the blood by the renal filtration system, and because the enzyme specific for the CM is not present at a detectable level (or is present at lower levels in non-disease tissues or is present in inactive conformation), accumulation of activated antibodies in the disease tissue is enhanced relative to non-disease tissues.

[0518] In another example, activatable antibodies can be used to detect the presence or absence of a cleaving agent in a sample. For example, where the activatable antibodies contain a CM susceptible to cleavage by an enzyme, the activatable antibodies can be used to detect (either qualitatively or quantitatively) the presence of an enzyme in the sample. In another example, where the activatable antibodies contain a CM susceptible to cleavage by reducing agent, the activatable antibodies can be used to detect (either qualitatively or quantitatively) the presence of reducing conditions in a sample. To facilitate analysis in these methods, the activatable antibodies can be detectably labeled, and can be bound to a support (e.g., a solid support, such as a slide or bead). The detectable label can be positioned on a portion of the activatable antibody that is not released following cleavage, for example, the detectable label can be a quenched fluorescent label or other label that is not detectable until cleavage has occurred. The assay can be conducted by, for example, contacting the immobilized, detectably labeled activatable antibodies with a sample suspected of containing an enzyme and/or reducing agent for a time sufficient for cleavage to occur, then washing to remove excess sample and contaminants. The presence or absence of the cleaving agent (e.g., enzyme or reducing agent) in the sample is then assessed by a change in detectable signal of the activatable antibodies prior to contacting with the sample e.g., the presence of and/or an increase in detectable signal due to cleavage of the activatable antibody by the cleaving agent in the sample.

[0519] Such detection methods can be adapted to also provide for detection of the presence or absence of a target that is capable of binding the AB of the activatable antibodies when cleaved. Thus, the assays can be adapted to assess the presence or absence of a cleaving agent and the presence or absence of a target of interest. The presence or absence of the cleaving agent can be detected by the presence of and/or an increase in detectable label of the activatable antibodies as described above, and the presence or absence of the target can be detected by detection of a target-AB complex e.g., by use of a detectably labeled anti-target antibody.

[0520] Activatable antibodies are also useful in in situ imaging for the validation of activatable antibody activation, e.g., by protease cleavage, and binding to a particular target. In situ imaging is a technique that enables localization of proteolytic activity and target in biological samples such as cell cultures or tissue sections. Using this technique, it is possible to confirm both binding to a given target and proteolytic activity based on the presence of a detectable label (e.g., a fluorescent label).

[0521] These techniques are useful with any frozen cells or tissue derived from a disease site (e.g. tumor tissue) or healthy tissues. These techniques are also useful with fresh cell or tissue samples.

[0522] In these techniques, an activatable antibody is labeled with a detectable label. The detectable label may be a fluorescent dye, (e.g. a fluorophore, Fluorescein Isothiocyanate (FITC), Rhodamine Isothiocyanate (TRITC), an Alexa Fluor® label), a near infrared (NIR) dye (e.g., Qdot® nanocrystals), a colloidal metal, a hapten, a radioactive marker, biotin and an amplification reagent such as streptavidin, or an enzyme (e.g. horseradish peroxidase or alkaline phosphatase).

[0523] Detection of the label in a sample that has been incubated with the labeled, activatable antibody indicates that the sample contains the target and contains a protease that is specific for the CM of the activatable antibody. In some embodiments, the presence of the protease can be confirmed using broad spectrum protease inhibitors such as those described herein, and/or by using an agent that is specific for the protease, for example, an antibody such as A11, which is specific for the protease matriptase and inhibits the proteolytic activity of matriptase; see e.g., International Publication Number WO 2010/129609, published 11 Nov. 2010. The same approach of using broad spectrum protease inhibitors such as those described herein, and/or by using a more selective inhibitory agent can be used to identify a protease that is specific for the CM of the activatable antibody. In some embodiments, the presence of the target can be confirmed using an agent that is specific for the target, e.g., another antibody, or the detectable label can be competed with unlabeled target. In some embodiments, unlabeled activatable antibody could be used, with detection by a labeled secondary antibody or more complex detection system.

[0524] Similar techniques are also useful for in vivo imaging where detection of the fluorescent signal in a subject, e.g., a mammal, including a human, indicates that the disease site contains the target and contains a protease that is specific for the CM of the activatable antibody.

[0525] These techniques are also useful in kits and/or as reagents for the detection, identification or characterization of protease activity in a variety of cells, tissues, and organisms based on the protease-specific CM in the activatable antibody.

[0526] The disclosure provides methods of using the antibodies and/or activatable antibodies in a variety of diagnostic and/or prophylactic indications. For example, the disclosure provides methods of detecting presence or absence of a cleaving agent and a target of interest in a subject or a sample by (i) contacting a subject or sample with an activatable antibody, wherein the activatable antibody comprises a masking moiety (MM), a cleavable moiety (CM) that is cleaved by the cleaving agent, e.g., a protease, and an antigen binding domain or fragment thereof (AB) that specifically binds the target of interest, wherein the activatable antibody in an uncleaved, non-activated state comprises a structural arrangement from N-terminus to C-terminus as follows: MM-CM-AB or AB-CM-MM; (a) wherein the MM is a peptide that inhibits binding of the AB to the target, and wherein the MM does not have an amino acid sequence of a naturally occurring binding partner of the AB and is not a modified form of a natural binding partner of the AB; and (b) wherein, in an uncleaved, non-activated state, the MM interferes with specific binding of the AB to the target, and in a cleaved, activated state the MM does not interfere or compete with specific binding of the AB to the target; and (ii) measuring a level of activated activatable antibody in the subject or sample, wherein a detectable level of activated activatable antibody in the subject or sample indicates that the cleaving agent and the target are present in the subject or sample and wherein no detectable level of activated activatable antibody in the subject or sample indicates that the cleaving agent, the target or both the cleaving agent and the target are absent and/or not sufficiently present in the subject or sample. In some embodiments, the activatable antibody is an activatable antibody to which a therapeutic agent is conjugated. In some embodiments, the activatable antibody is not conjugated to an agent. In some embodiments, the activatable antibody comprises a detectable label. In some embodiments, the detectable label is positioned on the AB. In some embodiments, measuring the level of activatable antibody in the subject or sample is accomplished using a secondary reagent that specifically binds to the activated antibody, wherein the reagent comprises a detectable label. In some embodiments, the secondary reagent is an antibody comprising a detectable label.

[0527] The disclosure also provides methods of detecting presence or absence of a cleaving agent in a subject or a sample by (i) contacting a subject or sample with an activatable antibody in the presence of a target of interest, e.g., the target, wherein the activatable antibody comprises a masking moiety (MM), a cleavable moiety (CM) that is cleaved by the cleaving agent, e.g., a protease, and an antigen binding domain or fragment thereof (AB) that specifically binds the target of interest, wherein the activatable antibody in an uncleaved, non-activated state comprises a structural arrangement from N-terminus to C-terminus as follows: MM-CM-AB or AB-CM-MM; (a) wherein the MM is a peptide that inhibits binding of the AB to the target, and wherein the MM does not have an amino acid sequence of a naturally occurring binding partner of the AB and is not a modified form of a natural binding partner of the AB; and (b) wherein, in an uncleaved, non-activated state, the MM interferes with specific binding of the AB to the target, and in a cleaved, activated state the MM does not interfere or compete with specific binding of the AB to the target; and (ii) measuring a level of activated activatable antibody in the subject or sample, wherein a detectable level of activated activatable antibody in the subject or sample indicates that the cleaving agent is present in the subject or sample and wherein no detectable level of activated activatable antibody in the subject or sample indicates that the cleaving agent is absent and/or not sufficiently present in the subject or sample. In some embodiments, the activatable antibody is an activatable antibody to which a therapeutic agent is conjugated. In some embodiments, the activatable antibody is not conjugated to an agent. In some embodiments, the activatable antibody comprises a detectable label. In some embodiments, the detectable label is positioned on the AB. In some embodiments, measuring the level of activatable antibody in the subject or sample is accomplished using a secondary reagent that specifically binds to the activated antibody, wherein the reagent comprises a detectable label. In some embodiments, the secondary reagent is an antibody comprising a detectable label.

[0528] The disclosure also provides kits for use in methods of detecting presence or absence of a cleaving agent and the target in a subject or a sample, where the kits include at least an activatable antibody comprises a masking moiety (MM), a cleavable moiety (CM) that is cleaved by the cleaving agent, e.g., a protease, and an antigen binding domain or fragment thereof (AB) that specifically binds the target of interest, wherein the activatable antibody in an uncleaved, non-activated state comprises a structural arrangement from N-terminus to C-terminus as follows: MM-CM-AB or AB-CM-MM; (a) wherein the MM is a peptide that inhibits binding of the AB to the target, and wherein the MM does not have an amino acid sequence of a naturally occurring binding partner of the AB and is not a modified form of a natural binding partner of the AB; and (b) wherein, in an uncleaved, non-activated state, the MM interferes with specific binding of the AB to the target, and in a cleaved, activated state the MM does not interfere or compete with specific binding of the AB to the target; and (ii) measuring a level of activated activatable antibody in the subject or sample, wherein a detectable level of activated activatable antibody in the subject or sample indicates that the cleaving agent is present in the subject or sample and wherein no detectable level of activated activatable antibody in the subject or sample indicates that the cleaving agent is absent and/or not sufficiently present in the subject or sample. In some embodiments, the activatable antibody is an activatable antibody to which a therapeutic agent is conjugated. In some embodiments, the activatable antibody is not conjugated to an agent. In some embodiments, the activatable antibody comprises a detectable label. In some embodiments, the detectable label is positioned on the AB. In some embodiments, measuring the level of activatable antibody in the subject or sample is accomplished using a secondary reagent that specifically binds to the activated antibody, wherein the reagent comprises a detectable label. In some embodiments, the secondary reagent is an antibody comprising a detectable label.

[0529] The disclosure also provides methods of detecting presence or absence of a cleaving agent in a subject or a sample by (i) contacting a subject or sample with an activatable antibody, wherein the activatable antibody comprises a masking moiety (MM), a cleavable moiety (CM) that is cleaved by the cleaving agent, e.g., a protease, an antigen binding domain (AB) that specifically binds the target, and a detectable label, wherein the activatable antibody in an uncleaved, non-activated state comprises a structural arrangement from N-terminus to C-terminus as follows: MM-CM-AB or AB-CM-MM; wherein the MM is a peptide that inhibits binding of the AB to the target, and wherein the MM does not have an amino acid sequence of a naturally occurring binding partner of the AB and is not a modified form of a natural binding partner of the AB; wherein, in an uncleaved, non-activated state, the MM interferes with specific binding of the AB to the target, and in a cleaved, activated state the MM does not interfere or compete with specific binding of the AB to the target; and wherein the detectable label is positioned on a portion of the activatable antibody that is released following cleavage of the CM; and (ii) measuring a level of detectable label in the subject or sample, wherein a detectable level of the detectable label in the subject or sample indicates that the cleaving agent is absent and/or not sufficiently present in the subject or sample and wherein no detectable level of the detectable label in the subject or sample indicates that the cleaving agent is present in the subject or sample. In some embodiments, the activatable antibody is an activatable antibody to which a therapeutic agent is conjugated. In some embodiments, the activatable antibody is not conjugated to an agent. In some embodiments, the activatable antibody comprises a detectable label. In some embodiments, the detectable label is positioned on the AB. In some embodiments, measuring the level of activatable antibody in the subject or sample is accomplished using a secondary reagent that specifically binds to the activated antibody, wherein the reagent comprises a detectable label. In some embodiments, the secondary reagent is an antibody comprising a detectable label.

[0530] The disclosure also provides kits for use in methods of detecting presence or absence of a cleaving agent and the target in a subject or a sample, where the kits include at least an activatable antibody and/or conjugated activatable antibody (e.g., an activatable antibody to which a therapeutic agent is conjugated) described herein for use in contacting a subject or biological sample and means for detecting the level of activated activatable antibody and/or conjugated activatable antibody in the subject or biological sample, wherein a detectable level of activated activatable antibody in the subject or biological sample indicates that the cleaving agent and the target are present in the subject or biological sample and wherein no detectable level of activated activatable antibody in the subject or biological sample indicates that the cleaving agent, the target or both the cleaving agent and the target are absent and/or not sufficiently present in the subject or biological sample, such that the target binding and/or protease cleavage of the activatable antibody cannot be detected in the subject or biological sample.

[0531] The disclosure also provides methods of detecting presence or absence of a cleaving agent in a subject or a sample by (i) contacting a subject or biological sample with an activatable antibody in the presence of the target, and (ii) measuring a level of activated activatable antibody in the subject or biological sample, wherein a detectable level of activated activatable antibody in the subject or biological sample indicates that the cleaving agent is present in the subject or biological sample and wherein no detectable level of activated activatable antibody in the subject or biological sample indicates that the cleaving agent is absent and/or not sufficiently present in the subject or biological sample at a detectable level, such that protease cleavage of the activatable antibody cannot be detected in the subject or biological sample. Such an activatable antibody includes a masking moiety (MM), a cleavable moiety (CM) that is cleaved by the cleaving agent, e.g., a protease, and an antigen binding domain or fragment thereof (AB) that specifically binds the target, wherein the activatable antibody in an uncleaved (i.e., non-activated) state comprises a structural arrangement from N-terminus to C-terminus as follows: MM-CM-AB or AB-CM-MM, (a) wherein the MM is a peptide that inhibits binding of the AB to the target, and wherein the MM does not have an amino acid sequence of a naturally occurring binding partner of the AB; and (b) wherein the MM of the activatable antibody in an uncleaved state interferes with specific binding of the AB to the target, and wherein the MM of an activatable antibody in a cleaved (i.e., activated) state does not interfere or compete with specific binding of the AB to the target. In some embodiments, the activatable antibody is an activatable antibody to which a therapeutic agent is conjugated. In some embodiments, the activatable antibody is not conjugated to an agent. In some embodiments, the detectable label is attached to the masking moiety. In some embodiments, the detectable label is attached to the cleavable moiety N-terminal to the protease cleavage site. In some embodiments, a single antigen binding site of the AB is masked. In some embodiments wherein an antibody of the disclosure has at least two antigen binding sites, at least one antigen binding site is masked and at least one antigen binding site is not masked. In some embodiments all antigen binding sites are masked. In some embodiments, the measuring step includes use of a secondary reagent comprising a detectable label.

[0532] The disclosure also provides kits for use in methods of detecting presence or absence of a cleaving agent and the target in a subject or a sample, where the kits include at least an activatable antibody and/or conjugated activatable antibody described herein for use in contacting a subject or biological sample with an activatable antibody in the presence of the target, and measuring a level of activated activatable antibody in the subject or biological sample, wherein a detectable level of activated activatable antibody in the subject or biological sample indicates that the cleaving agent is present in the subject or biological sample and wherein no detectable level of activated activatable antibody in the subject or biological sample indicates that the cleaving agent is absent and/or not sufficiently present in the subject or biological sample at a detectable level, such that protease cleavage of the activatable antibody cannot be detected in the subject or biological sample. Such an activatable antibody includes a masking moiety (MM), a cleavable moiety (CM) that is cleaved by the cleaving agent, e.g., a protease, and an antigen binding domain or fragment thereof (AB) that specifically binds the target, wherein the activatable antibody in an uncleaved (i.e., non-activated) state comprises a structural arrangement from N-terminus to C-terminus as follows: MM-CM-AB or AB-CM-MM; (a) wherein the MM is a peptide that inhibits binding of the AB to the target, and wherein the MM does not have an amino acid sequence of a naturally occurring binding partner of the AB; and (b) wherein the MM of the activatable antibody in an uncleaved state interferes with specific binding of the AB to the target, and wherein the MM of an activatable antibody in a cleaved (i.e., activated) state does not interfere or compete with specific binding of the AB to the target. In some embodiments, the activatable antibody is an activatable antibody to which a therapeutic agent is conjugated. In some embodiments, the activatable antibody is not conjugated to an agent. In some embodiments, the detectable label is attached to the masking moiety. In some embodiments, the detectable label is attached to the cleavable moiety N-terminal to the protease cleavage site. In some embodiments, a single antigen binding site of the AB is masked. In some embodiments wherein an antibody of the disclosure has at least two antigen binding sites, at least one antigen binding site is masked and at least one antigen binding site is not masked. In some embodiments all antigen binding sites are masked. In some embodiments, the measuring step includes use of a secondary reagent comprising a detectable label.

[0533] The disclosure also provides kits for use in methods of detecting presence or absence of a cleaving agent in a subject or a sample, where the kits include at least an activatable antibody and/or conjugated activatable antibody described herein for use in contacting a subject or biological sample and means for detecting the level of activated activatable antibody and/or conjugated activatable antibody in the subject or biological sample, wherein the activatable antibody includes a detectable label that is positioned on a portion of the activatable antibody that is released following cleavage of the CM, wherein a detectable level of activated activatable antibody in the subject or biological sample indicates that the cleaving agent is absent and/or not sufficiently present in the subject or biological sample such that the target binding and/or protease cleavage of the activatable antibody cannot be detected in the subject or biological sample, and wherein no detectable level of activated activatable antibody in the subject or biological sample indicates that the cleaving agent is present in the subject or biological sample at a detectable level.

[0534] The disclosure provides methods of detecting presence or absence of a cleaving agent and the target in a subject or a sample by (i) contacting a subject or biological sample with an activatable antibody, wherein the activatable antibody includes a detectable label that is positioned on a portion of the activatable antibody that is released following cleavage of the CM and (ii) measuring a level of activated activatable antibody in the subject or biological sample, wherein a detectable level of activated activatable antibody in the subject or biological sample indicates that the cleaving agent, the target or both the cleaving agent and the target are absent and/or not sufficiently present in the subject or biological sample, such that the target binding and/or protease cleavage of the activatable antibody cannot be detected in the subject or biological sample, and wherein a reduced detectable level of activated activatable antibody in the subject or biological sample indicates that the cleaving agent and the target are present in the subject or biological sample. A reduced level of detectable label is, for example, a reduction of about 5%, about 10%, about 15%, about 20%, about 25%, about 30%, about 35%, about 40%, about 45%, about 50%, about 55%, about 60%, about 65%, about 70%, about 75%, about 80%, about 85%, about 90%, about 95% and/or about 100%. Such an activatable antibody includes a masking moiety (MM), a cleavable moiety (CM) that is cleaved by the cleaving agent, and an antigen binding domain or fragment thereof (AB) that specifically binds the target, wherein the activatable antibody in an uncleaved (i.e., non-activated) state comprises a structural arrangement from N-terminus to C-terminus as follows: MM-CM-AB or AB-CM-MM; (a) wherein the MM is a peptide that inhibits binding of the AB to the target, and wherein the MM does not have an amino acid sequence of a naturally occurring binding partner of the AB; and (b) wherein the MM of the activatable antibody in an uncleaved state interferes with specific binding of the AB to the target, and wherein the MM of an activatable antibody in a cleaved (i.e., activated) state does not interfere or compete with specific binding of the AB to the target. In some embodiments, the activatable antibody is an activatable antibody to which a therapeutic agent is conjugated. In some embodiments, the activatable antibody is not conjugated to an agent. In some embodiments, the activatable antibody comprises a detectable label. In some embodiments, the detectable label is positioned on the AB. In some embodiments, measuring the level of activatable antibody in the subject or sample is accomplished using a secondary reagent that specifically binds to the activated antibody, wherein the reagent comprises a detectable label. In some embodiments, the secondary reagent is an antibody comprising a detectable label.

[0535] The disclosure also provides kits for use in methods of detecting presence or absence of a cleaving agent and the target in a subject or a sample, where the kits include at least an activatable antibody and/or conjugated activatable antibody described herein for use in contacting a subject or biological sample and means for detecting the level of activated activatable antibody and/or conjugated activatable antibody in the subject or biological sample, wherein a detectable level of activated activatable antibody in the subject or biological sample indicates that the cleaving agent, the target or both the cleaving agent and the target are absent and/or not sufficiently present in the subject or biological sample, such that the target binding and/or protease cleavage of the activatable antibody cannot be detected in the subject or biological sample, and wherein a reduced detectable level of activated activatable antibody in the subject or biological sample indicates that the cleaving agent and the target are present in the subject or biological sample. A reduced level of detectable label is, for example, a reduction of about 5%, about 10%, about 15%, about 20%, about 25%, about 30%, about 35%, about 40%, about 45%, about 50%, about 55%, about 60%, about 65%, about 70%, about 75%, about 80%, about 85%, about 90%, about 95% and/or about 100%.

[0536] The disclosure also provides methods of detecting presence or absence of a cleaving agent in a subject or a sample by (i) contacting a subject or biological sample with an activatable antibody, wherein the activatable antibody includes a detectable label that is positioned on a portion of the activatable antibody that is released following cleavage of the CM; and (ii) measuring a level of detectable label in the subject or biological sample, wherein a detectable level of the detectable label in the subject or biological sample indicates that the cleaving agent is absent and/or not sufficiently present in the subject or biological sample at a detectable level, such that protease cleavage of the activatable antibody cannot be detected in the subject or biological sample, and wherein a reduced detectable level of the detectable label in the subject or biological sample indicates that the cleaving agent is present in the subject or biological sample. A reduced level of detectable label is, for example, a reduction of about 5%, about 10%, about 15%, about 20%, about 25%, about 30%, about 35%, about 40%, about 45%, about 50%, about 55%, about 60%, about 65%, about 70%, about 75%, about 80%, about 85%, about 90%, about 95% and/or about 100%. Such an activatable antibody includes a masking moiety (MM), a cleavable moiety (CM) that is cleaved by the cleaving agent, and an antigen binding domain or fragment thereof (AB) that specifically binds the target, wherein the activatable antibody in an uncleaved (i.e., non-activated) state comprises a structural arrangement from N-terminus to C-terminus as follows: MM-CM-AB or AB-CM-MM; (a) wherein the MM is a peptide that inhibits binding of the AB to the target, and wherein the MM does not have an amino acid sequence of a naturally occurring binding partner of the AB; and (b) wherein the MM of the activatable antibody in an uncleaved state interferes with specific binding of the AB to the target, and wherein the MM of an activatable antibody in a cleaved (i.e., activated) state does not interfere or compete with specific binding of the AB to the target. In some embodiments, the activatable antibody is an activatable antibody to which a therapeutic agent is conjugated. In some embodiments, the activatable antibody is not conjugated to an agent. In some embodiments, the activatable antibody comprises a detectable label. In some embodiments, the detectable label is positioned on the AB. In some embodiments, measuring the level of activatable antibody in the subject or sample is accomplished using a secondary reagent that specifically binds to the activated antibody, wherein the reagent comprises a detectable label. In some embodiments, the secondary reagent is an antibody comprising a detectable label.

[0537] The disclosure also provides kits for use in methods of detecting presence or absence of a cleaving agent of interest in a subject or a sample, where the kits include at least an activatable antibody and/or conjugated activatable antibody described herein for use in contacting a subject or biological sample and means for detecting the level of activated activatable antibody and/or conjugated activatable antibody in the subject or biological sample, wherein the activatable antibody includes a detectable label that is positioned on a portion of the activatable antibody that is released following cleavage of the CM, wherein a detectable level of the detectable label in the subject or biological sample indicates that the cleaving agent, the target, or both the cleaving agent and the target are absent and/or not sufficiently present in the subject or biological sample, such that the target binding and/or protease cleavage of the activatable antibody cannot be detected in the subject or biological sample, and wherein a reduced detectable level of the detectable label in the subject or biological sample indicates that the cleaving agent and the target are present in the subject or biological sample. A reduced level of detectable label is, for example, a reduction of about 5%, about 10%, about 15%, about 20%, about 25%, about 30%, about 35%, about 40%, about 45%, about 50%, about 55%, about 60%, about 65%, about 70%, about 75%, about 80%, about 85%, about 90%, about 95% and/or about 100%.

[0538] In some embodiments of these methods and kits, the activatable antibody includes a detectable label. In some embodiments of these methods and kits, the detectable label includes an imaging agent, a contrasting agent, an enzyme, a fluorescent label, a chromophore, a dye, one or more metal ions, or a ligand-based label. In some embodiments of these methods and kits, the imaging agent comprises a radioisotope. In some embodiments of these methods and kits, the radioisotope is indium or technetium. In some embodiments of these methods and kits, the contrasting agent comprises iodine, gadolinium or iron oxide. In some embodiments of these methods and kits, the enzyme comprises horseradish peroxidase, alkaline phosphatase, or β-galactosidase. In some embodiments of these methods and kits, the fluorescent label comprises yellow fluorescent protein (YFP), cyan fluorescent protein (CFP), green fluorescent protein (GFP), modified red fluorescent protein (mRFP), red fluorescent protein tdimer2 (RFP tdimer2), HCRED, or a europium derivative. In some embodiments of these methods and kits, the luminescent label comprises an N-methylacrydium derivative. In some embodiments of these methods, the label comprises an Alexa Fluor® label, such as Alex Fluor® 680 or Alexa Fluor® 750. In some embodiments of these methods and kits, the ligand-based label comprises biotin, avidin, streptavidin or one or more haptens.

[0539] In some embodiments of these methods and kits, the subject is a mammal. In some embodiments of these methods and kits, the subject is a human. In some embodiments, the subject is a non-human mammal, such as a non-human primate, companion animal (e.g., cat, dog, horse), farm animal, work animal, or zoo animal. In some embodiments, the subject is a rodent.

[0540] In some embodiments of these methods, the method is an in vivo method. In some embodiments of these methods, the method is an in situ method. In some embodiments of these methods, the method is an ex vivo method. In some embodiments of these methods, the method is an in vitro method.

[0541] In some embodiments, in situ imaging and/or in vivo imaging are useful in methods to identify which patients to treat. For example, in in situ imaging, the activatable antibodies are used to screen patient samples to identify those patients having the appropriate protease(s) and target(s) at the appropriate location, e.g., at a tumor site.

[0542] In some embodiments in situ imaging is used to identify or otherwise refine a patient population suitable for treatment with an activatable antibody of the disclosure. For example, patients that test positive for both the target (e.g., the target) and a protease that cleaves the substrate in the cleavable moiety (CM) of the activatable antibody being tested (e.g., accumulate activated antibodies at the disease site) are identified as suitable candidates for treatment with such an activatable antibody comprising such a CM. Likewise, patients that test negative for either or both of the target (e.g., the target) and the protease that cleaves the substrate in the CM in the activatable antibody being tested using these methods might be identified as suitable candidates for another form of therapy. In some embodiments, such patients that test negative with respect to a first activatable antibody can be tested with other activatable antibodies comprising different CMs until a suitable activatable antibody for treatment is identified (e.g., an activatable antibody comprising a CM that is cleaved by the patient at the site of disease). In some embodiments, the patient is then administered a therapeutically effective amount of the activatable antibody for which the patient tested positive.

[0543] In some embodiments in vivo imaging is used to identify or otherwise refine a patient population suitable for treatment with an activatable antibody of the disclosure. For example, patients that test positive for both the target (e.g., the target) and a protease that cleaves the substrate in the cleavable moiety (CM) of the activatable antibody being tested (e.g., accumulate activated antibodies at the disease site) are identified as suitable candidates for treatment with such an activatable antibody comprising such a CM. Likewise, patients that test negative might be identified as suitable candidates for another form of therapy. In some embodiments, such patients that test negative with respect to a first activatable antibody can be tested with other activatable antibodies comprising different CMs until a suitable activatable antibody for treatment is identified (e.g., an activatable antibody comprising a CM that is cleaved by the patient at the site of disease). In some embodiments, the patient is then administered a therapeutically effective amount of the activatable antibody for which the patient tested positive.

[0544] In some embodiments of the methods and kits, the method or kit is used to identify or otherwise refine a patient population suitable for treatment with an activatable antibody of the disclosure. For example, patients that test positive for both the target (e.g., the target) and a protease that cleaves the substrate in the cleavable moiety (CM) of the activatable antibody being tested in these methods are identified as suitable candidates for treatment with such an activatable antibody comprising such a CM. Likewise, patients that test negative for both of the targets (e.g., the target) and the protease that cleaves the substrate in the CM in the activatable antibody being tested using these methods might be identified as suitable candidates for another form of therapy. In some embodiments, such patients can be tested with other activatable antibodies until a suitable activatable antibody for treatment is identified (e.g., an activatable antibody comprising a CM that is cleaved by the patient at the site of disease). In some embodiments, patients that test negative for either of the target (e.g., the target) are identified as suitable candidates for treatment with such an activatable antibody comprising such a CM. In some embodiments, patients that test negative for either of the target (e.g., the target) are identified as not being suitable candidates for treatment with such an activatable antibody comprising such a CM. In some embodiments, such patients can be tested with other activatable antibodies until a suitable activatable antibody for treatment is identified (e.g., an activatable antibody comprising a CM that is cleaved by the patient at the site of disease). In some embodiments, the activatable antibody is an activatable antibody to which a therapeutic agent is conjugated. In some embodiments, the activatable antibody is not conjugated to an agent. In some embodiments, the activatable antibody comprises a detectable label. In some embodiments, the detectable label is positioned on the AB. In some embodiments, measuring the level of activatable antibody in the subject or sample is accomplished using a secondary reagent that specifically binds to the activated antibody, wherein the reagent comprises a detectable label. In some embodiments, the secondary reagent is an antibody comprising a detectable label.

[0545] In some embodiments, a method or kit is used to identify or otherwise refine a patient population suitable for treatment with an anti-the target activatable antibody and/or conjugated activatable antibody (e.g., activatable antibody to which a therapeutic agent is conjugated) of the disclosure, followed by treatment by administering that activatable antibody and/or conjugated activatable antibody to a subject in need thereof. For example, patients that test positive for both the targets (e.g., the target) and a protease that cleaves the substrate in the cleavable moiety (CM) of the activatable antibody and/or conjugated activatable antibody being tested in these methods are identified as suitable candidates for treatment with such antibody and/or such a conjugated activatable antibody comprising such a CM, and the patient is then administered a therapeutically effective amount of the activatable antibody and/or conjugated activatable antibody that was tested. Likewise, patients that test negative for either or both of the target (e.g., the target) and the protease that cleaves the substrate in the CM in the activatable antibody being tested using these methods might be identified as suitable candidates for another form of therapy. In some embodiments, such patients can be tested with other antibody and/or conjugated activatable antibody until a suitable antibody and/or conjugated activatable antibody for treatment is identified (e.g., an activatable antibody and/or conjugated activatable antibody comprising a CM that is cleaved by the patient at the site of disease). In some embodiments, the patient is then administered a therapeutically effective amount of the activatable antibody and/or conjugated activatable antibody for which the patient tested positive.

[0546] In some embodiments of these methods and kits, the MM is a peptide having a length from about 4 to 40 amino acids. In some embodiments of these methods and kits, the activatable antibody comprises a linker peptide, wherein the linker peptide is positioned between the MM and the CM. In some embodiments of these methods and kits, the activatable antibody comprises a linker peptide, where the linker peptide is positioned between the AB and the CM. In some embodiments of these methods and kits, the activatable antibody comprises a first linker peptide (L1) and a second linker peptide (L2), wherein the first linker peptide is positioned between the MM and the CM and the second linker peptide is positioned between the AB and the CM. In some embodiments of these methods and kits, each of L1 and L2 is a peptide of about 1 to 20 amino acids in length, and wherein each of L1 and L2 need not be the same linker. In some embodiments of these methods and kits, one or both of L1 and L2 comprises a glycine-serine polymer. In some embodiments of these methods and kits, at least one of L1 and L2 comprises an amino acid sequence selected from the group consisting of (GS)n, (GSGGS)n (SEQ ID NO: 191) and (GGS)n (SEQ ID NO: 192), where n is an integer of at least one. In some embodiments of these methods and kits, at least one of L1 and L2 comprises an amino acid sequence having the formula (GGS)n, where n is an integer of at least one. In some embodiments of these methods and kits, at least one of L1 and L2 comprises an amino acid sequence selected from the group consisting of Gly-Gly-Ser-Gly (SEQ ID NO: 193), Gly-Gly-Ser-Gly-Gly (SEQ ID NO: 194), Gly-Ser-Gly-Ser-Gly (SEQ ID NO: 195), Gly-Ser-Gly-Gly-Gly (SEQ ID NO: 196), Gly-Gly-Gly-Ser-Gly (SEQ ID NO: 197), and Gly-Ser-Ser-Ser-Gly (SEQ ID NO: 198).

[0547] In some embodiments of these methods and kits, the AB comprises an antibody or antibody fragment sequence selected from the cross-reactive antibody sequences presented herein. In some embodiments of these methods and kits, the AB comprises a Fab fragment, a scFv or a single chain antibody (scAb).

[0548] In some embodiments of these methods and kits, the cleaving agent is a protease that is co-localized in the subject or sample with the target and the CM is a polypeptide that functions as a substrate for the protease, wherein the protease cleaves the CM in the activatable antibody when the activatable antibody is exposed to the protease. In some embodiments of these methods and kits, the CM is a polypeptide of up to 15 amino acids in length. In some embodiments of these methods and kits, the CM is coupled to the N-terminus of the AB. In some embodiments of these methods and kits, the CM is coupled to the C-terminus of the AB. In some embodiments of these methods and kits, the CM is coupled to the N-terminus of a VL chain of the AB.

[0549] The antibodies, conjugated antibodies, activatable antibodies and/or conjugated activatable antibodies of the disclosure are used in diagnostic and prophylactic formulations. In one embodiment, an activatable antibody is administered to patients that are at risk of developing one or more of the aforementioned inflammation, inflammatory disorders, cancer or other disorders.

[0550] A patient's or organ's predisposition to one or more of the aforementioned disorders can be determined using genotypic, serological or biochemical markers.

[0551] In some embodiments of the disclosure, an antibody, a conjugated antibody, an activatable antibody and/or a conjugated activatable antibody is administered to human individuals diagnosed with a clinical indication associated with one or more of the aforementioned disorders. Upon diagnosis, an antibody, a conjugated antibody, an activatable antibody and/or a conjugated activatable antibody is administered to mitigate or reverse the effects of the clinical indication.

[0552] Antibodies, conjugated antibodies, activatable antibodies and/or conjugated activatable antibodies of the disclosure are also useful in the detection of the target in patient samples and accordingly are useful as diagnostics. For example, the antibodies, conjugated antibodies, the activatable antibodies and/or conjugated activatable antibodies of the disclosure are used in in vitro assays, e.g., ELISA, to detect target levels in a patient sample.

[0553] In one embodiment, an antibody and/or activatable antibody of the disclosure is immobilized on a solid support (e.g., the well(s) of a microtiter plate). The immobilized antibody and/or activatable antibody serves as a capture antibody for any target that may be present in a test sample. Prior to contacting the immobilized antibody and/or activatable antibody with a patient sample, the solid support is rinsed and treated with a blocking agent such as milk protein or albumin to prevent nonspecific adsorption of the analyte.

[0554] Subsequently the wells are treated with a test sample suspected of containing the antigen, or with a solution containing a standard amount of the antigen. Such a sample is, e.g., a serum sample from a subject suspected of having levels of circulating antigen considered to be diagnostic of a pathology. After rinsing away the test sample or standard, the solid support is treated with a second antibody that is detectably labeled. The labeled second antibody serves as a detecting antibody. The level of detectable label is measured, and the concentration of target antigen in the test sample is determined by comparison with a standard curve developed from the standard samples.

[0555] It will be appreciated that based on the results obtained using the antibodies and/or activatable antibodies of the disclosure in an in vitro diagnostic assay, it is possible to stage a disease in a subject based on expression levels of the Target antigen. For a given disease, samples of blood are taken from subjects diagnosed as being at various stages in the progression of the disease, and/or at various points in the therapeutic treatment of the disease. Using a population of samples that provides statistically significant results for each stage of progression or therapy, a range of concentrations of the antigen that may be considered characteristic of each stage is designated.

[0556] Antibodies, conjugated antibodies, activatable antibodies and/or conjugated activatable antibodies can also be used in diagnostic and/or imaging methods. In some embodiments, such methods are in vitro methods. In some embodiments, such methods are in vivo methods. In some embodiments, such methods are in sit, methods. In some embodiments, such methods are ex vivo methods. For example, activatable antibodies having an enzymatically cleavable CM can be used to detect the presence or absence of an enzyme that is capable of cleaving the CM. Such activatable antibodies can be used in diagnostics, which can include in vivo detection (e.g., qualitative or quantitative) of enzyme activity (or, in some embodiments, an environment of increased reduction potential such as that which can provide for reduction of a disulfide bond) through measured accumulation of activated antibodies (i.e., antibodies resulting from cleavage of an activatable antibody) in a given cell or tissue of a given host organism. Such accumulation of activated antibodies indicates not only that the tissue expresses enzymatic activity (or an increased reduction potential depending on the nature of the CM) but also that the tissue expresses target to which the activated antibody binds.

[0557] For example, the CM can be selected to be a protease substrate for a protease found at the site of a tumor, at the site of a viral or bacterial infection at a biologically confined site (e.g., such as in an abscess, in an organ, and the like), and the like. The AB can be one that binds a target antigen. Using methods familiar to one skilled in the art, a detectable label (e.g., a fluorescent label or radioactive label or radiotracer) can be conjugated to an AB or other region of an activatable antibody. Suitable detectable labels are discussed in the context of the above screening methods and additional specific examples are provided below. Using an AB specific to a protein or peptide of the disease state, along with a protease whose activity is elevated in the disease tissue of interest, activatable antibodies will exhibit an increased rate of binding to disease tissue relative to tissues where the CM specific enzyme is not present at a detectable level or is present at a lower level than in disease tissue or is inactive (e.g., in zymogen form or in complex with an inhibitor). Since small proteins and peptides are rapidly cleared from the blood by the renal filtration system, and because the enzyme specific for the CM is not present at a detectable level (or is present at lower levels in non-disease tissues or is present in inactive conformation), accumulation of activated antibodies in the disease tissue is enhanced relative to non-disease tissues.

[0558] In another example, activatable antibodies can be used to detect the presence or absence of a cleaving agent in a sample. For example, where the activatable antibodies contain a CM susceptible to cleavage by an enzyme, the activatable antibodies can be used to detect (either qualitatively or quantitatively) the presence of an enzyme in the sample. In another example, where the activatable antibodies contain a CM susceptible to cleavage by reducing agent, the activatable antibodies can be used to detect (either qualitatively or quantitatively) the presence of reducing conditions in a sample. To facilitate analysis in these methods, the activatable antibodies can be detectably labeled, and can be bound to a support (e.g., a solid support, such as a slide or bead). The detectable label can be positioned on a portion of the activatable antibody that is not released following cleavage, for example, the detectable label can be a quenched fluorescent label or other label that is not detectable until cleavage has occurred. The assay can be conducted by, for example, contacting the immobilized, detectably labeled activatable antibodies with a sample suspected of containing an enzyme and/or reducing agent for a time sufficient for cleavage to occur, then washing to remove excess sample and contaminants. The presence or absence of the cleaving agent (e.g., enzyme or reducing agent) in the sample is then assessed by a change in detectable signal of the activatable antibodies prior to contacting with the sample e.g., the presence of and/or an increase in detectable signal due to cleavage of the activatable antibody by the cleaving agent in the sample.

[0559] Such detection methods can be adapted to also provide for detection of the presence or absence of a target that is capable of binding the AB of the activatable antibodies when cleaved. Thus, the assays can be adapted to assess the presence or absence of a cleaving agent and the presence or absence of a target of interest. The presence or absence of the cleaving agent can be detected by the presence of and/or an increase in detectable label of the activatable antibodies as described above, and the presence or absence of the target can be detected by detection of a target-AB complex e.g., by use of a detectably labeled anti-target antibody.

[0560] Activatable antibodies are also useful in in situ imaging for the validation of activatable antibody activation, e.g., by protease cleavage, and binding to a particular target. In situ imaging is a technique that enables localization of proteolytic activity and target in biological samples such as cell cultures or tissue sections. Using this technique, it is possible to confirm both binding to a given target and proteolytic activity based on the presence of a detectable label (e.g., a fluorescent label).

[0561] These techniques are useful with any frozen cells or tissue derived from a disease site (e.g. tumor tissue) or healthy tissues. These techniques are also useful with fresh cell or tissue samples.

[0562] In these techniques, an activatable antibody is labeled with a detectable label. The detectable label may be a fluorescent dye, (e.g. Fluorescein Isothiocyanate (FITC), Rhodamine Isothiocyanate (TRITC), a near infrared (NIR) dye (e.g., Qdot® nanocrystals), a colloidal metal, a hapten, a radioactive marker, biotin and an amplification reagent such as streptavidin, or an enzyme (e.g. horseradish peroxidase or alkaline phosphatase).

[0563] Detection of the label in a sample that has been incubated with the labeled, activatable antibody indicates that the sample contains the target and contains a protease that is specific for the CM of the activatable antibody. In some embodiments, the presence of the protease can be confirmed using broad spectrum protease inhibitors such as those described herein, and/or by using an agent that is specific for the protease, for example, an antibody such as A11, which is specific for the protease matriptase and inhibits the proteolytic activity of matriptase; see e.g., International Publication Number WO 2010/129609, published 11 Nov. 2010. The same approach of using broad spectrum protease inhibitors such as those described herein, and/or by using a more selective inhibitory agent can be used to identify a protease or class of proteases specific for the CM of the activatable antibody. In some embodiments, the presence of the target can be confirmed using an agent that is specific for the target, e.g., another antibody, or the detectable label can be competed with unlabeled target. In some embodiments, unlabeled activatable antibody could be used, with detection by a labeled secondary antibody or more complex detection system.

[0564] Similar techniques are also useful for in vivo imaging where detection of the fluorescent signal in a subject, e.g., a mammal, including a human, indicates that the disease site contains the target and contains a protease that is specific for the CM of the activatable antibody.

[0565] These techniques are also useful in kits and/or as reagents for the detection, identification or characterization of protease activity in a variety of cells, tissues, and organisms based on the protease-specific CM in the activatable antibody.

[0566] In some embodiments, in situ imaging and/or in vivo imaging are useful in methods to identify which patients to treat. For example, in in situ imaging, the activatable antibodies are used to screen patient samples to identify those patients having the appropriate protease(s) and target(s) at the appropriate location, e.g., at a tumor site.

[0567] In some embodiments in situ imaging is used to identify or otherwise refine a patient population suitable for treatment with an activatable antibody of the disclosure. For example, patients that test positive for both the target and a protease that cleaves the substrate in the cleavable moiety (CM) of the activatable antibody being tested (e.g., accumulate activated antibodies at the disease site) are identified as suitable candidates for treatment with such an activatable antibody comprising such a CM. Likewise, patients that test negative for either or both of the target and the protease that cleaves the substrate in the CM in the activatable antibody being tested using these methods are identified as suitable candidates for another form of therapy (i.e., not suitable for treatment with the activatable antibody being tested). In some embodiments, such patients that test negative with respect to a first activatable antibody can be tested with other activatable antibodies comprising different CMs until a suitable activatable antibody for treatment is identified (e.g., an activatable antibody comprising a CM that is cleaved by the patient at the site of disease).

[0568] In some embodiments in vivo imaging is used to identify or otherwise refine a patient population suitable for treatment with an activatable antibody of the disclosure. For example, patients that test positive for both the target and a protease that cleaves the substrate in the cleavable moiety (CM) of the activatable antibody being tested (e.g., accumulate activated antibodies at the disease site) are identified as suitable candidates for treatment with such an activatable antibody comprising such a CM. Likewise, patients that test negative are identified as suitable candidates for another form of therapy (i.e., not suitable for treatment with the activatable antibody being tested). In some embodiments, such patients that test negative with respect to a first activatable antibody can be tested with other activatable antibodies comprising different CMs until a suitable activatable antibody for treatment is identified (e.g., an activatable antibody comprising a CM that is cleaved by the patient at the site of disease).

[0569] Pharmaceutical Compositions

[0570] The antibodies, conjugated antibodies, activatable antibodies and/or conjugated activatable antibodies of the disclosure (also referred to herein as “active compounds”), and derivatives, fragments, analogs and homologs thereof, can be incorporated into pharmaceutical compositions suitable for administration. Such compositions typically comprise the antibody, the conjugated antibody, activatable antibody and/or conjugated activatable antibody and a pharmaceutically acceptable carrier. As used herein, the term “pharmaceutically acceptable carrier” is intended to include any and all solvents, dispersion media, coatings, antibacterial and antifungal agents, isotonic and absorption delaying agents, and the like, compatible with pharmaceutical administration. Suitable carriers are described in the most recent edition of Remington's Pharmaceutical Sciences, a standard reference text in the field, which is incorporated herein by reference. Suitable examples of such carriers or diluents include, but are not limited to, water, saline, ringer's solutions, dextrose solution, and 5% human serum albumin. Liposomes and non-aqueous vehicles such as fixed oils may also be used. The use of such media and agents for pharmaceutically active substances is well known in the art. Except insofar as any conventional media or agent is incompatible with the active compound, use thereof in the compositions is contemplated. Supplementary active compounds can also be incorporated into the compositions.

[0571] A pharmaceutical composition of the disclosure is formulated to be compatible with its intended route of administration. Examples of routes of administration include parenteral, e.g., intravenous, intradermal, subcutaneous, oral (e.g., inhalation), transdermal (i.e., topical), transmucosal, and rectal administration. Solutions or suspensions used for parenteral, intradermal, or subcutaneous application can include the following components: a sterile diluent such as water for injection, saline solution, fixed oils, polyethylene glycols, glycerine, propylene glycol or other synthetic solvents; antibacterial agents such as benzyl alcohol or methyl parabens; antioxidants such as ascorbic acid or sodium bisulfite; chelating agents such as ethylenediaminetetraacetic acid (EDTA); buffers such as acetates, citrates or phosphates, and agents for the adjustment of tonicity such as sodium chloride or dextrose. The pH can be adjusted with acids or bases, such as hydrochloric acid or sodium hydroxide. The parenteral preparation can be enclosed in ampoules, disposable syringes or multiple dose vials made of glass or plastic.

[0572] Pharmaceutical compositions suitable for injectable use include sterile aqueous solutions (where water soluble) or dispersions and sterile powders for the extemporaneous preparation of sterile injectable solutions or dispersion. For intravenous administration, suitable carriers include physiological saline, bacteriostatic water, Cremophor EL™ (BASF, Parsippany, N.J.) or phosphate buffered saline (PBS). In all cases, the composition must be sterile and should be fluid to the extent that easy syringeability exists. It must be stable under the conditions of manufacture and storage and must be preserved against the contaminating action of microorganisms such as bacteria and fungi. The carrier can be a solvent or dispersion medium containing, for example, water, ethanol, polyol (for example, glycerol, propylene glycol, and liquid polyethylene glycol, and the like), and suitable mixtures thereof. The proper fluidity can be maintained, for example, by the use of a coating such as lecithin, by the maintenance of the required particle size in the case of dispersion and by the use of surfactants. Prevention of the action of microorganisms can be achieved by various antibacterial and antifungal agents, for example, parabens, chlorobutanol, phenol, ascorbic acid, thimerosal, and the like. In some embodiments, it will be desirable to include isotonic agents, for example, sugars, polyalcohols such as manitol, sorbitol, sodium chloride in the composition. Prolonged absorption of the injectable compositions can be brought about by including in the composition an agent that delays absorption, for example, aluminum monostearate and gelatin.

[0573] Sterile injectable solutions can be prepared by incorporating the active compound in the required amount in an appropriate solvent with one or a combination of ingredients enumerated above, as required, followed by filtered sterilization. Generally, dispersions are prepared by incorporating the active compound into a sterile vehicle that contains a basic dispersion medium and the required other ingredients from those enumerated above. In the case of sterile powders for the preparation of sterile injectable solutions, methods of preparation are vacuum drying and freeze-drying that yields a powder of the active ingredient plus any additional desired ingredient from a previously sterile-filtered solution thereof.

[0574] Oral compositions generally include an inert diluent or an edible carrier. They can be enclosed in gelatin capsules or compressed into tablets. For the purpose of oral therapeutic administration, the active compound can be incorporated with excipients and used in the form of tablets, troches, or capsules. Oral compositions can also be prepared using a fluid carrier for use as a mouthwash, wherein the compound in the fluid carrier is applied orally and swished and expectorated or swallowed. Pharmaceutically compatible binding agents, and/or adjuvant materials can be included as part of the composition. The tablets, pills, capsules, troches and the like can contain any of the following ingredients, or compounds of a similar nature: a binder such as microcrystalline cellulose, gum tragacanth or gelatin; an excipient such as starch or lactose, a disintegrating agent such as alginic acid, Primogel, or corn starch; a lubricant such as magnesium stearate or Sterotes; a glidant such as colloidal silicon dioxide; a sweetening agent such as sucrose or saccharin; or a flavoring agent such as peppermint, methyl salicylate, or orange flavoring.

[0575] For administration by inhalation, the compounds are delivered in the form of an aerosol spray from pressured container or dispenser that contains a suitable propellant, e.g., a gas such as carbon dioxide, or a nebulizer.

[0576] Systemic administration can also be by transmucosal or transdermal means. For transmucosal or transdermal administration, penetrants appropriate to the barrier to be permeated are used in the formulation. Such penetrants are generally known in the art, and include, for example, for transmucosal administration, detergents, bile salts, and fusidic acid derivatives. Transmucosal administration can be accomplished through the use of nasal sprays or suppositories. For transdermal administration, the active compounds are formulated into ointments, salves, gels, or creams as generally known in the art.

[0577] The compounds can also be prepared in the form of suppositories (e.g., with conventional suppository bases such as cocoa butter and other glycerides) or retention enemas for rectal delivery.

[0578] In one embodiment, the active compounds are prepared with carriers that will protect the compound against rapid elimination from the body, such as a controlled release formulation, including implants and microencapsulated delivery systems. Biodegradable, biocompatible polymers can be used, such as ethylene vinyl acetate, polyanhydrides, polyglycolic acid, collagen, polyorthoesters, and polylactic acid. Methods for preparation of such formulations will be apparent to those skilled in the art. The materials can also be obtained commercially from Alza Corporation and Nova Pharmaceuticals, Inc. Liposomal suspensions (including liposomes targeted to infected cells with monoclonal antibodies to viral antigens) can also be used as pharmaceutically acceptable carriers. These can be prepared according to methods known to those skilled in the art, for example, as described in U.S. Pat. No. 4,522,811.

[0579] It is especially advantageous to formulate oral or parenteral compositions in dosage unit form for ease of administration and uniformity of dosage. Dosage unit form as used herein refers to physically discrete units suited as unitary dosages for the subject to be treated; each unit containing a predetermined quantity of active compound calculated to produce the desired therapeutic effect in association with the required pharmaceutical carrier. The specification for the dosage unit forms of the disclosure are dictated by and directly dependent on the unique characteristics of the active compound and the particular therapeutic effect to be achieved, and the limitations inherent in the art of compounding such an active compound for the treatment of individuals.

[0580] The pharmaceutical compositions can be included in a container, pack, or dispenser together with instructions for administration.

[0581] The invention will be further described in the following examples, which do not limit the scope of the invention described in the claims.

### EXAMPLES

### Example 1

### Selection of Human ScFvs of the Embodiments that Bind Human and/or Mouse PDL1

[0582] This Example demonstrates that ScFvs (single-chain variable fragments) of the embodiments that bind PDL1 can be selected from a phage display library of ScFvs with diverse CDR sequences, and that such binding can inhibit PDL1 binding to PD1 and B7-1.

[0583] ScFvs were selected from a fully human ScFv library displayed on M13 bacteriophage; ScFv phage selection was conducted under contract with Creative Biolabs, Shirley, N.Y. A fusion protein comprised of the extracellular domain (ECD) of human PDL1 or mouse PDL1, with a carboxy terminal His6 tag (Sino Biological, Cat. No. 10084-H02H-200) was used as the antigen in three alternating rounds of selection for ScFvs displayed on M13 bacteriophage that bind PDL1. In the first round, bound phage were released by trypsin digestion, and in subsequent rounds, phage were eluted by human PD1 fusion protein (R&D Systems; Cat. No. 1080-PD-050) competition. Five (5) unique ScFvs that bind PDL1 were isolated. Table 1 lists the 5 ScFvs and SEQ ID NOs of their respective nucleic acid sequences and amino acid sequences.

TABLE 1
SEQ ID NOs of selected ScFvs

| ScFv | Nucleic acid sequence | Amino acid sequence |
|---|---|---|
| PDL1 c8 | SEQ ID NO: 1 | SEQ ID NO: 2 |
| PDL1 c12 | SEQ ID NO: 3 | SEQ ID NO: 4 |
| PDL1 c16 | SEQ ID NO: 5 | SEQ ID NO: 6 |
| PDL1 c20 | SEQ ID NO: 7 | SEQ ID NO: 8 |
| PDL1 c60 | SEQ ID NO: 9 | SEQ ID NO: 10 |

[0584] The nucleic acid and amino acid sequences of each of the anti-PDL1 ScFvs (with CDRs underlined) are shown below:

SEQ ID NO: 1
GAGGTGCAGCTGTTGGAGTCTGGGGGAGGCTTGGTACAGCCTGGGGGGTC
CCTGAGACTCTCCTGTGCAGCCTCTGGATTCACCTTTAGCAGCTATGCCA
TGAGCTGGGTCCGCCAGGCTCCAGGGAAGGGGCTGGAGTGGGTCTCAGAT
ATTACTGCGTCGGGTTAGAGGACAACGTACGCAGACTCCGTGAAGGGCCG
GTTCACCATCTCCAGAGACAATTCCAAGAACACGCTGTATCTGCAAATGA
ACAGCCTGAGAGCCGAGGACACGGCCGTATATTACTGTGCGAGATCGAAG
ATTGCTTTTGACTACTGGGGCCAGGGAACCCTGGTCACCGTCTCGAGCGG
TGGAGGCGGTTCAGGCGGAGGTGGCAGCGGCGGTGGCGGGTCGACGGACA
TCCAGATGACCCAGTCTCCATCCTCCCTGTCTGCATCTGTAGGAGACAGA
GTCACCATCACTTGCCGGGCAAGTCAGAGCATTAGCAGCTATTTAAATTG
GTATCAGCAGAAACCAGGGAAAGCCCCTAAGCTCCTGATCTATAAGGCAT
CCCGTTTGCAAAGTGGGGTCCCATCAAGGTTCAGTGGCAGTGGATCTGGG
ACAGATTTCACTCTCACCATCAGCAGTCTGCAACCTGAAGATTTTGCAAC
TTACTACTGTCAACAGCGTGCGCTTAAGCCTGTGACGTTCGGCCAAGGGA
CCAAGGTGGAAATCAAACGG
SEQ ID NO: 2
EVQLLESGGGLVQPGGSLRLSCAASGFTFSSYAMSWVRQAPGKGLEWVSD
ITASGQRTTYADSVKGRFTISRDNSKNTLYLQMNSLRAEDTAVYYCARSK
IAFDYWGQGTLVTVSSGGGGSGGGGSGGGGSTDIQMTQSPSSLSASVGDR
VTITCRASQSISSYLNWYQQKPGKAPKLLIYKASRLQSGVPSRFSGSGSG
TDFTLTISSLQPEDFATYYCQQRALKPVTFGQGTKVEIKR
SEQ ID NO: 3
GAGGTGCAGCTGTTGGAGTCTGGGGGAGGCTTGGTACAGCCTGGGGGGTC
CCTGAGACTATCCTGTGCAGCCTCTGGATTCACCTTTAGCAGCTATGCCA
TGAGCTGGGTCCGCCAGGCTCCAGGGAAGGGGCTGGAGTGGGTCTCAAGT
ATTAATAAGGATGGTCATTATACAAGTTACGCAGACTCCGTGAAGGGCCG
GTTCACCATCTCCAGAGACAATTCCAAGAACACGCTGTATCTGCAAATGA
ACAGCCTGAGAGCCGAGGACACGGCCGTATATTACTGTGCGAAAAATCTT
GATGAGTTTGACTACTGGGGCCAGGGAACCCTGGTCACCGTCTCGAGCGG
TGGAGGCGGTTCAGGCGGAGGTGGCAGCGGCGGTGGCGGGTCGACGGACA
TCCAGATGACCCAGTCTCCATCCTCCCTGTCTGCATCTGTAGGAGACAGA
GTCACCATCACTTGCCGGGCAAGTCAGAGCATTAGCAGCTATTTAAATTG
GTATCAGCAGAAACCAGGGAAAGCCCCTAAGCTCCTGATCTATGCTGCAT
CCAGTTTGCAAAGTGGGGTCCCATCAAGGTTCAGTGGCAGTGGATCTGGG
ACAGATTTCACTCTCACCATCAGCAGTCTGCAACCTGAAGATTTTGCAAC
TTACTACTGTCAACAGAGTTACAGTACCCCTAATACGTTCGGCCAAGGGA
CCAAGGTGGAAATCAAACGG
SEQ ID NO: 4
EVQLLESGGGLVQPGGSLRLSCAASGFTFSSYAMSWVRQAPGKGLEWVSS
INKDGHYTSYADSVKGRFTISRDNSKNTLYLQMNSLRAEDTAVYYCAKNL
DEFDYWGQGTLVTVSSGGGGSGGGGSGGGGSTDIQMTQSPSSLSASVGDR
VTITCRASQSISSYLNWYQQKPGKAPKLLIYAASSLQSGVPSRFSGSGSG
TDFTLTISSLQPEDFATYYCQQSYSTPNTFGQGTKVEIKR
SEQ ID NO: 5
GAGGTGCAGCTGTTGGAGTCTGGGGGAGGCTTGGTACAGCCTGGGGGGTC
CCTGAGACTCTCCTGTGCAGCCTCTGGATTCACCTTTAGCAGCTATGCCA
TGAGCTGGGTCCGCCAGGCTCCAGGGAAGGGGCTGGAGTGGGTCTCATCT
ATTATGGCTACTGGTGCTGGTACATTGTACGCAGACTCCGTGAAGGGCCG
GTTCACCATCTCCAGAGACAATTCCAAGAACACGCTGTATCTGCAAATGA
ACAGCCTGAGAGCCGAGGACACGGCCGTATATTACTGTGCGAAAGATGGT
GCGGGGTTTGACTACTGGGGCCAGGGAACCCTGGTCACCGTCTCGAGCGG
TGGAGGCGGTTCAGGCGGAGGTGGCAGCGGCGGTGGCGGGTCGACGGACA
TCCAGATGACCCAGTCTCCATCCTCCCTGTCTGCATCTGTAGGAGACAGA
GTCACCATCACTTGCCGGGCAAGTCAGAGCATTAGCAGCTATTTAAATTG
GTATCAGCAGAAACCAGGGAAAGCCCCTAAGCTCCTGATCTATTCTGCAT
CCCAGTTGCAAAGTGGGGTCCCATCAAGGTTCAGTGGCAGTGGATCTGGG
ACAGATTTCACTCTCACCATCAGCAGTCTGCAACCTGAAGATTTTGCAAC
TTACTACTGTCAACAGGCGAATTCGCGGCCTTCTACGTTCGGCCAAGGGA
CCAAGGTGGAAATCAAACGG
SEQ ID NO: 6
EVQLLESGGGLVQPGGSLRLSCAASGFTFSSYAMSWVRQAPGKGLEWVSS
IMATGAGTLYADSVKGRFTISRDNSKNTLYLQMNSLRAEDTAVYYCAKDG
AGFDYWGQGTLVTVSSGGGGSGGGGSGGGGSTDIQMTQSPSSLSASVGDR
VTITCRASQSISSYLNWYQQKPGKAPKLLIYSASQLQSGVPSRFSGSGSG
TDFTLTISSLQPEDFATYYCQQANSRPSTFGQGTKVEIKR
SEQ ID NO: 7
GAGGTGCAGCTGTTGGAGTCTGGGGGAGGCTTGGTACAGCCTGGGGGGTC
CCTGAGACTCTCCTGTGCAGCCTCTGGATTCACCTTTAGCAGCTATGCCA
TGAGCTGGGTCCGCCAGGCTCCAGGGAAGGGGCTGTAGTGGGTCTCAACT
ATTACTTCTTCTGGTGCTGCTACATATTACGCAGACTCCGTGAAGGGCCG
GTTCACCATCTCCAGAGACAATTCCAAGAACACGCTGTATCTGCAAATGA
ACAGCCTGAGAGCCGAGGACACGGCCGTATATTACTGTGCGAAAAATTAT
ACTGGTTTTGACTACTGGGGCCAGGGAACCCTGGTCACCGTCTCGAGCGG
TGGAGGCGGTTCAGGCGGAGGTGGCAGCGGCGGTGGCGGGTCGACGGACA
TCCAGATGACCCAGTCTCCATCCTCCCTGTCTGCATCTGTAGGAGACAGA
GTCACCATCACTTGCCGGGCAAGTCAGAGCATTAGCAGCTATTTAAATTG
GTATCAGCAGAAACCAGGGAAAGCCCCTAAGCTCCTGATCTATAATGCAT
CCTCCTTGCAAAGTGGGGTCCCATCAAGGTTCAGTGGCAGTGGATCTGGG
ACAGATTTCACTCTCACCATCAGCAGTCTGCAACCTGAAGATTTTGCAAC
TTACTACTGTCAACAGTATACTTATGGTCCTGGTACGTTCGGCCAAGGGA
CCAAGGTGGAAATCAAACGG
SEQ ID NO: 8
EVQLLESGGGLVQPGGSLRLSCAASGFTFSSYAMSWVRQAPGKGLQWVST
ITSSGAATYYADSVKGRFTISRDNSKNTLYLQMNSLRAEDTAVYYCAKNY
TGFDYWGQGTLVTVSSGGGGSGGGGSGGGGSTDIQMTQSPSSLSASVGDR
VTITCRASQSISSYLNWYQQKPGKAPKLLIYNASSLQSGVPSRFSGSGSG
TDFTLTISSLQPEDFATYYCQQYTYGPGTFGQGTKVEIKR
SEQ ID NO: 9
GAGGTGCAGCTGTTGGAGTCTGGGGGAGGCTTGGTACAGCCTGGGGGGTC
CCTGAGACTCTCCTGTGCAGCCTCTGGATTCACCTTTAGCAGCTATGCCA
TGAGCTGGGTCCGCCAGGCTCCAGGGAAGGGGCTGGAGTGGGTCTCAAGT
ATTTATTCTACTGGTGGTGCTACAGCTTACGCAGACTCCGTGAAGGGCCG
GTTCACCATCTCCAGAGACAATTCCAAGAACACGCTGTATCTGCAAATGA
ACAGCCTGAGAGCCGAGGACACGGCCGTATATTACTGTGCGAAATCTTCT
GCTGGTTTTGACTACTGGGGCCAGGGAACCCTGGTCACCGTCTCGAGCGG
TGGAGGCGGTTCAGGCGGAGGTGGCAGCGGCGGTGGCGGGTCGACGGACA
TCCAGATGACCCAGTCTCCATCCTCCCTGTCTGCATCTGTAGGAGACAGA
GTCACCATCACTTGCCGGGCAAGTCAGAGCATTAGCAGCTATTTAAATTG
GTATCAGCAGAAACCAGGGAAAGCCCCTAAGCTCCTGATCTATTATGCAT
CCACTTTGCAAAGTGGGGTCCCATCAAGGTTCAGTGGCAGTGGATCTGGG
ACAGATTTCACTCTCACCATCAGCAGTCTGCAACCTGAAGATTTTGCAAC
TTACTACTGTCAACAGGATAATGGTTATCCTTCTACGTTCGGCCAAGGGA
CCAAGGTGGAAATCAAACGG
SEQ ID NO: 10
EVQLLESGGGLVQPGGSLRLSCAASGFTFSSYAMSWVRQAPGKGLEWVSS
IYSTGGATAYADSVKGRFTISRDNSKNTLYLQMNSLRAEDTAVYYCAKSS
AGFDYWGQGTLVTVSSGGGGSGGGGSGGGGSTDIQMTQSPSSLSASVGDR
VTITCRASQSISSYLNWYQQKPGKAPKLLIYYASTLQSGVPSRFSGSGSG
TDFTLTISSLQPEDFATYYCQQDNGYPSTFGQGTKVEIKR

[0585] FIG. 1A shows by ELISA-based binding that PDL1 c60 ScFv-phage binds specifically to human and mouse PDL1. Briefly, human PDL1, mouse PDL1, human PD1, mouse PD1, human 41BBLig or Notch1 (R&D Systems) were adsorbed to separate wells of a 96-well ELISA plate. Phage were applied to the plate and allowed to bind. Bound phage were visualized with an anti-M13-HRP conjugate (GE Healthcare, Piscataway, N.Y.) and developed with the chromogenic substrate tetramethyl benzidine (TMB) (Thermo Scientific, Rockford, Ill.).

[0586] FIG. 2A shows that inclusion of PD1 can inhibit the binding of PDL1 ScFv-phage binding to PDL1 in an ELISA binding assay. Briefly, human PDL1 or mouse PDL1 (R&D Systems) was adsorbed to separate wells of a 96-well ELISA plate. Phage were applied to the plate in the presence or absence of human or mouse PD1-Fc (R&D Systems) and allowed to bind. Bound phage were visualized with an anti-M13-HRP conjugate (GE Healthcare, Piscataway, N.Y.) and developed with the chromogenic substrate tetramethyl benzidine (TMB) (Thermo Scientific, Rockford, Ill.). Phage binding was reduced in the presence of PD1-Fc, demonstrating that the binding epitope of the phage overlaps with that of PD1 binding.

### Example 2

### Production and Testing of Fully Human Anti-PDL1 c60 IgG Antibodies

[0587] This Example demonstrates that PDL1 c60 ScFv-phage that bind human and mouse PDL1 can be converted into fully human IgG antibodies that retain human and mouse PDL1 binding.

[0588] Production of fully human IgGs comprising the variable domains of PDL1 c60 was accomplished using techniques similar to those described in PCT Publication No. WO 2010/081173. DNA molecules encoding the variable domains of PDL1 c60 ScFv-phage were cloned into expression vectors for the expression of fully human IgGs. Light chain (Lc) variable domains were amplified from the ScFv templates. Vector (LcpOP (modified from pCDNA3, Invitrogen, Carlsbad, Calif.)) and amplified DNA were cut with BsiWI and EcoRI overnight, combined by ligation and transformed into E. coli MC1061 cells. Heavy chain (Hc) variable domains were amplified from ScFv templates. Fully human IgGs anti-PDL1 c60 were expressed from transiently transfected HEK-293 cells and purified from the culture supernatant by Protein A chromatography.

[0589] FIG. 3A shows that the fully human anti-PDL1 c60 IgG binds human and mouse PDL1, with affinity for human PDL1 of 1 nM and for mouse PDL1 of 30 nM. Briefly human PDL1-Fc or mouse PDL1-Fc (R & D Systems, Minneapolis, Minn.) was adsorbed to the wells of a 96-well ELISA plate. Purified anti-PDL1 c60 was applied to the plate and allowed to bind. Bound antibody was visualized with an anti-human IgG-HRP conjugate, Fab specific, (Sigma, St Louis, Mo.: Cat #A0293-1ML) and developed with the chromogenic substrate TMB.

### Example 3

### Affinity Maturation of Anti-PDL1 Antibodies of the Embodiments

[0590] This Example demonstrates the isolation of antibodies of the embodiments with improved binding kinetics and manufacturability profile.

[0591] Anti-PDL1 antibodies were isolated from libraries with CDRs modified from anti-PDL1 c60. Such libraries were designed as shown in Tables 2 and 3. Four libraries of Fab-Phage, based on the sequence of anti-PDL1 c60, were constructed using degenerate synthetic DNA. Residues were either varied by randomization at each indicated nucleotide. In addition, within libraries 3 and 6, additional randomized residues were added to CDR3 of the heavy chain. Libraries were transfected into E. coli strain TG1 and phage were prepared following super-infection with M13KO7 (Invitrogen).

[0592] Three rounds of selection were performed for each library with increasing stringency. Three alternating rounds of selection were done by mixing biotinylated Human PDL1 or Biotinylated mouse PDL1 with phage that were blocked with 100 μg/mL pooled human IgG (huIgG, or hIgG) and 2% non-fat dried milk (NFDM) in Tris-buffered saline (TBS; 40 mM Tris, 129 mM NaCl, pH 7.4). Following incubation at room temperature Bio-PDL1 bound to phage were captured with streptavidin magnetic beads which were washed extensively at 37° C. and the remaining bound phage eluted with 100 mM triethanolamine (TEA) (Sigma, St. Louis, Mo.) and expanded through E. coli TG1. Selected Lc libraries were combined with He libraries and each subjected to an additional seven rounds of selection.

TABLE 2
CDR sequences for affinity maturation variable heavy chain libraries

| IMGT | . . . | 32 | 33 | 34 | 39 | 40 | . . . | 55 | 56 | 57 | 58 | 59 | 60 | 61 | 62 | 63 | 66 | 67 | . . . | 107 | 108 | 109 | 110 | 111 | 112 | 113 | |
|---|---|---|---|---|---|---|---|---|---|---|---|---|---|---|---|---|---|---|---|---|---|---|---|---|---|---|---|
| VH3-29 germline | | S | Y | A | M | S | | A | I | S | G | S | G | G | S | T | Y | Y | | — | — | — | — | — | — | — | |
| | | (SEQ ID NO: 158) | | | | | | | | (SEQ ID NO: 159) | | | | | | | | | | | | | | | | | |
| Clone 60 | | S | Y | A | M | S | | S | I | Y | S | T | G | G | A | T | A | Y | | S | S | A | G | F | D | Y | |
| | | (SEQ ID NO: 158) | | | | | | | | (SEQ ID NO: 160) | | | | | | | | | | (SEQ ID NO: 162) | | | | | | | |
| H2 | | | | | | | | x | | x | x | x | | x | x | | x | | | | | | | | | | 3.36E+07 |

(SEQ ID NO: 161)

| | | | | | | | |
|---|---|---|---|---|---|---|---|
| H3 walk | (SEQ ID NO: 163) | x | x | | | | 1.02E+04 |
| | (SEQ ID NO: 164) | | x | x | | | |
| | (SEQ ID NO: 165) | | | x | x | | |
| | (SEQ ID NO: 166) | x | | x | | | |
| | (SEQ ID NO: 167) | x | | | x | | |
| | (SEQ ID NO: 168) | | x | | x | | |
| | (SEQ ID NO: 169) | x | | | | x | |
| | (SEQ ID NO: 170) | | x | | | x | |
| | (SEQ ID NO: 171) | | | x | | x | |
| | (SEQ ID NO: 172) | | | | x | x | |

| | | | |
|---|---|---|---|
| H3 insertions: 4xNNK between G110 and F111 | (SEQ ID NO: 173) | T(x)₁₋₃F | 1E+06 |

TABLE 3
CDR sequences for affinity maturation variable light chain libraries

| IMGT | . . . | 27 | 28 | 29 | 30 | 31 | 32 | . . . | 56 | 57 | 58 | 66 | . . . | 104 | 105 | 106 | 107 | 108 | 109 | 110 | 111 | 112 | |
|---|---|---|---|---|---|---|---|---|---|---|---|---|---|---|---|---|---|---|---|---|---|---|---|
| Vk1-39 germline | | Q | S | I | S | S | Y | | A | A | S | S | | C | Q | Q | S | Y | S | T | P | P | |
| | | | (SEQ ID NO: 174) | | | | | (SEQ ID NO: 175) | | | | | | | | (SEQ ID NO: 177) | | | | | | | |
| Clone 60 | | Q | S | I | S | S | Y | | Y | A | S | T | | C | Q | Q | D | N | G | Y | P | S | T |

| | | |
|---|---|---|
| (SEQ ID NO: 174) | (SEQ ID NO: 176) | (SEQ ID NO: 178) |

| | | | | | | | | | | |
|---|---|---|---|---|---|---|---|---|---|---|
| L2nnk + L3 walk | (SEQ ID NO: 179) | x | x | x | x | | | | | 1.26E+07 |
| | (SEQ ID NO: 180) | x | x | | x | x | | | | |
| | (SEQ ID NO: 181) | x | x | | | x | x | | | |
| | (SEQ ID NO: 182) | x | x | | | | x | x | | |
| | (SEQ ID NO: 183) | x | x | | | | | x | x | |
| | (SEQ ID NO: 184) | x | x | x | | x | | | | |
| | (SEQ ID NO: 185) | x | x | x | | | x | | | |
| | (SEQ ID NO: 186) | x | x | x | | | | x | | |
| | (SEQ ID NO: 187) | x | x | | x | | x | | | |
| | (SEQ ID NO: 188) | x | x | | x | | | x | | |
| | (SEQ ID NO: 189) | x | x | | | x | | x | | |
| | (SEQ ID NO: 190) | x | x | | | | x | x | | |

[0593] Forty seven (47) individual isolates were chosen from the final pool. Phage were derived from each isolate and assayed for binding to human PDL1-Fc, human B7-1-Fc and human CD28-Fc antigens (R&D Systems). Briefly, the antigens were adsorbed to the wells of a 96-well ELISA plate, each ligand on a separate plate. Phage were applied to correlative wells on each plate and allowed to bind. Bound phage were visualized with an anti-M13-HRP conjugate and developed with the chromogenic substrate TMB. Based on the results of the ELISA and DNA sequence, 6 unique clones with matured heavy variable CDR3 domains and 10 heavy variable CDR2 domains were chosen for further study. Thirteen phage clones, 10 CDR2 and 3 CDR3 were analyzed for their ability to bind mouse and human PDL1, and the results of a phage ELISA are shown in FIG. 4A and FIG. 4B. All phage clones bind human PDL1 but not B7-1, in addition, CDR2 clones C05 and G12 show strong binding to mouse PDL1 and CDR3 clone H9 showed weak binding to mouse PDL1. Table 4 lists the heavy variable domains encoded by the clones and SEQ ID NOs for the nucleic acid sequences and amino acid sequences of their respective heavy chains. The light variable domains for each are identical to that of c60 (SEQ ID NO 11 and 12).

SEQ ID NO: 11
GACATCCAGATGACCCAGTCTCCATCCTCCCTGTCTGCATCTGTAGGAGA
CAGAGTCACCATCACTTGCCGGGCAAGTCAGAGCATTAGCAGCTATTTAA
ATTGGTATCAGCAGAAACCAGGGAAAGCCCCTAAGCTCCTGATCTATTAT
GCATCCACTTTGCAAAGTGGGGTCCCATCAAGGTTCAGTGGCAGTGGATC
TGGGACAGATTTCACTCTCACCATCAGCAGTCTGCAACCTGAAGATTTTG
CAACTTACTACTGTCAACAGGATAATGGTTATCCTTCTACGTTCGGCCAA
GGGACCAAGGTGGAAATCAAACGG
SEQ ID NO: 12
DIQMTQSPSSLSASVGDRVTITCRASQSISSYLNWYQQKPGKAPKLLIYY
ASTLQSGVPSRFSGSGSGTDFTLTISSLQPEDFATYYCQQDNGYPSTFGQ
GTKVEIKR

TABLE 4
Matured anti-PDL1 variable domains

| VH | Nucleic acid sequence | Amino acid sequence |
|---|---|---|
| PDL1 c1 | SEQ ID NO: 13 | SEQ ID NO: 14 |
| PDL1 d1 | SEQ ID NO: 15 | SEQ ID NO: 16 |
| PDL1 g7 | SEQ ID NO: 17 | SEQ ID NO: 18 |
| PDL1 h9 | SEQ ID NO: 19 | SEQ ID NO: 20 |
| PDL1 b10 | SEQ ID NO: 21 | SEQ ID NO: 22 |
| PDL1 E10 | SEQ ID NO: 23 | SEQ ID NO: 24 |
| PDL1 A05 | SEQ ID NO: 25 | SEQ ID NO: 26 |
| PDL1 C05 | SEQ ID NO: 27 | SEQ ID NO: 28 |
| PDL1 C10 | SEQ ID NO: 29 | SEQ ID NO: 30 |
| PDL1 D08 | SEQ ID NO: 31 | SEQ ID NO: 32 |
| PDL1 G09 | SEQ ID NO: 33 | SEQ ID NO: 34 |
| PDL1 G10 | SEQ ID NO: 35 | SEQ ID NO: 36 |
| PDL1 G12 | SEQ ID NO: 37 | SEQ ID NO: 38 |
| PDL1 E11 | SEQ ID NO: 39 | SEQ ID NO: 40 |
| PDL1 D01 | SEQ ID NO: 41 | SEQ ID NO: 42 |
| PDL1 H06 | SEQ ID NO: 43 | SEQ ID NO: 44 |

SEQ ID NO: 13
GAGGTGCAGCTGTTGGAGTCTGGGGGAGGCTTGGTACAGCCTGGGGGGTC
CCTGAGACTCTCCTGTGCAGCCTCTGGATTCACCTTTAGCAGCTATGCCA
TGAGCTGGGTCCGCCAGGCTCCAGGGAAGGGGCTGGAGTGGGTCTCAAGT
ATTTATTCTACTGGTGGTGCTACAGCTTACGCAGACTCCGTGAAGGGCCG
GTTCACCATCTCCAGAGACAATTCCAAGAACACGCTGTATCTGCAAATGA
ACAGCCTGAGAGCCGAGGACACGGCCGTATATTACTGTGCGAAATCTTCT
GCTGGTAGTCGGCCGGGTTTTGACTACTGGGGCCAGGGAACCCTGGTCAC
CGTCTCGAGC
SEQ ID NO: 14
EVQLLESGGGLVQPGGSLRTSCAASGFTFSSYAMSWVRQAPGKGLEWVSS
IYSTGGATAYADSVKGRFTISRDNSKNTLYLQMNSLRAEDTAVYYCAKSS
AGQSRPGFDYWGQGTLVTVSS
SEQ ID NO: 15
GAGGTGCAGCTGTTGGAGTCTGGGGGAGGCTTGGTACAGCCTGGGGGGTC
CCTGAGACTCTCCTGTGCAGCCTCTGGATTCACCTTTAGCAGCTATGCCA
TGAGCTGGGTCCGCCAGGCTCCAGGGAAGGGGCTGGAGTGGGTCTCAAGT
ATTTATTCTACTGGTGGTGCTACAGCTTACGCAGACTCCGTGAAGGGCCG
GTTCACCATCTCCAGAGACAATTCCAAGAACACGCTGTATCTGCAAATGA
ACAGCCTGAGAGCCGAGGACACGGCCGTATATTACTGTGCGAAATCTTCT
GCTGGTTCGTGGCCGGGTTTTGACTACTGGGGCCAGGGAACCCTGGTCAC
CGTCTCGAGC
SEQ ID NO: 16
EVQLLESGGGLVQPGGSLRLSCAASGFTFSSYAMSWVRQAPGKGLEWVSS
IYSTGGATAYADSVKGRFTISRDNSKNTLYLQMNSLRAEDTAVYYCAKSS
AGQSWPGFDYWGQGTLVTVSS
SEQ ID NO: 17
GAGGTGCAGCTGTTGGAGTCTGGGGGAGGCTTGGTACAGCCTGGGGGGTC
CCTGAGACTCTCCTGTGCAGCCTCTGGATTCACCTTTAGCAGCTATGCCA
TGAGCTGGGTCCGCCAGGCTCCAGGGAAGGGGCTGGAGTGGGTCTCAAGT
ATTTATTCTACTGGTGGTGCTACAGCTTACGCAGACTCCGTGAAGGGCCG
GTTCACCATCTCCAGAGACAATTCCAAGAACACGCTGTATCTGCAAATGA
ACAGCCTGAGAGCCGAGGACACGGCCGTATATTACTGTGCGAAATCTTCT
GCTGGTCAGTCGTTTCCGGGTTTTGACTACTGGGGCCAGGGAACCCTGGT
CACCGTCTCGAGC
SEQ ID NO: 18
EVQLLESGGGLVQPGGSLRLSCAASGFTFSSYAMSWVRQAPGKGLEWVSS
IYSTGGATAYADSVKGRFTISRDNSKNTLYLQMNSLRAEDTAVYYCAKSS
AGQSFPGFDYWGQGTLVTVSS
SEQ ID NO: 19
GAGGTGCAGCTGTTGGAGTCTGGGGGAGGCTTGGTACAGCCTGGGGGGTC
CCTGAGACTCTCCTGTGCAGCCTCTGGATTCACCTTTAGCAGCTATGCCA
TGAGCTGGGTCCGCCAGGCTCCAGGGAAGGGGCTGGAGTGGGTCTCAAGT
ATTTATTCTACTGGTGGTGCTACAGCTTACGCAGACTCCGTGAAGGGCCG
GTTCACCATCTCCAGAGACAATTCCAAGAACACGCTGTATCTGCAAATGA
ACAGCCTGAGAGCCGAGGACACGGCCGTATATTACTGTGCGAAATGGTCT
GCTGCTTTTGACTACTGGGGCCAGGGAACCCTGGTCACCGTCTCGAGC
SEQ ID NO: 20
EVQLLESGGGLVQPGGSLRLSCAASGFTFSSYAMSWVRQAPGKGLEWVSS
IYSTGGATAYADSVKGRFTISRDNSKNTLYLQMNSLRAEDTAVYYCAKWS
AAFDYWGQGTLVTVSS
SEQ ID NO: 21
GAGGTGCAGCTGTTGGAGTCTGGGGGAGGCTTGGTACAGCCTGGGGGGTC
CCTGAGACTCTCCTGTGCAGCCTCTGGATTCACCTTTAGCAGCTATGCCA
TGAGCTGGGTCCGCCAGGCTCCAGGGAAGGGGCTGGAGTGGGTCTCAAGT
ATTTATTCTACTGGTGGTGCTACAGCTTACGCAGACTCCGTGAAGGGCCG
GTTCACCATCTCCAGAGACAATTCCAAGAACACGCTGTATCTGCAAATGA
ACAGCCTGAGAGCCGAGGACACGGCCGTATATTACTGTGCGAAATGGTCT
GCTGCTTTTGACTACTGGGGCCAGGGAACCCTGGTCACCGTCTCGAGC
SEQ ID NO: 22
EVQLLESGGGLVQPGGSLRLSCAASGFTFSSYAMSWVRQAPGKGLEWVSS
IYSTGGATAYADSVKGRFTISRDNSKNTLYLQMNSLRAEDTAVYYCAKWS
AGYDYWGQGTLVTVSS
SEQ ID NO: 23
GAGGTGCAGCTGTTGGAGTCTGGGGGAGGCTTGGTACAGCCTGGGGGGTC
CCTGAGACTCTCCTGTGCAGCCTCTGGATTCACCTTTAGCAGCTATGCCA
TGAGCTGGGTCCGCCAGGCTCCAGGGAAGGGGCTGGAGTGGGTCTCAAGT
ATTTATTCTACTGGTGGTGCTACAGCTTACGCAGACTCCGTGAAGGGCCG
GTTCACCATCTCCAGAGACAATTCCAAGAACACGCTGTATCTGCAAATGA
ACAGCCTGAGAGCCGAGGACACGGCCGTATATTACTGTGCGAAATGGTCT
AAGGGTTTTGACTACTGGGGCCAGGGAACCCTGGTCACCGTCTCGAGC
SEQ ID NO: 24
EVQLLESGGGLVQPGGSLRLSCAASGFTFSSYAMSWVRQAPGKGLEWVSS
IYSTGGATAYADSVKGRFTISRDNSKNTLYLQMNSLRAEDTAVYYCAKWS
KGFDYWGQGTLVTVSS
SEQ ID NO: 25
GAGGTGCAGCTGTTGGAGTCTGGGGGAGGCTTGGTACAGCCTGGGGGGTC
CCTGAGACTCTCCTGTGCAGCCTCTGGATTCACCTTTAGCAGCTATGCCA
TGAGCTGGGTCCGCCAGGCTCCAGGGAAGGGGCTGGAGTGGGTCTCAAGT
ATTTGGAAGTAGGGTATTGTGACAGTGAGCTTACGCAGACTCCGTGAAGG
GCCGGTTCACCATCTCCAGAGACAATTCCAAGAACACGCTGTATCTGCAA
ATGAACAGCCTGAGAGCCGAGGACACGGCCGTATATTACTGTGCGAAATC
TTCTGCTGGTTTTGACTACTGGGGCCAGGGAACCCTGGTCACCGTCTCGA
GC
SEQ ID NO: 26
EVQLLESGGGLVQPGGSLRLSCAASGFTFSSYAMSWVRQAPGKGLEWVSS
IWKQGIVTVYDSVKGRFTISRDNSKNTLYLQMNSLRAEDTAVYYCAKSSA
GFDYWGQGTLVTV
SEQ ID NO: 27
GAGGTGCAGCTGTTGGAGTCTGGGGGAGGCTTGGTACAGCCTGGGGGGTC
CCTGAGACTCTCCTGTGCAGCCTCTGGATTCACCTTTAGCAGCTATGCCA
TGAGCTGGGTCCGCCAGGCTCCAGGGAAGGGGCTGGAGTGGGTCTCAAGT
ATTTGGCGGAATGGTATTGTTACAGTTAGCTTACGCAGACTCCGTGAAGG
GCCGGTTCACCATCTCCAGAGACAATTCCAAGAACACGCTGTATCTGCAA
ATGAACAGCCTGAGAGCCGAGGACACGGCCGTATATTACTGTGCGAAATC
TTCTGCTGGTTTTGACTACTGGGGCCAGGGAACCCTGGTCACCGTCTCGA
GC
SEQ ID NO: 28
EVQLLESGGGLVQPGGSLRLSCAASGFTFSSYAMSWVRQAPGKGLEWVSS
IWRNGIVTVYDSVKGRFTISRDNSKNTLYLQMNSLRAEDTAVYYCAKSSA
GFDYWGQGTLVTVSS
SEQ ID NO: 29
GAGGTGCAGCTGTTGGAGTCTGGGGGAGGCTTGGTACAGCCTGGGGGGTC
CCTGAGACTCTCCTGTGCAGCCTCTGGATTCACCTTTAGCAGCTATGCCA
TGAGCTGGGTCCGCCAGGCTCCAGGGAAGGGGCTGGAGTGGGTCTCAGAT
ATTTGGAAGTAGGGTATGGTTACAGTGAGCTTACGCAGACTCCGTGAAGG
GCCGGTTCACCATCTCCAGAGACAATTCCAAGAACACGCTGTATCTGCAA
ATGAACAGCCTGAGAGCCGAGGACACGGCCGTATATTACTGTGCGAAATC
TTCTGCTGGTTTTGACTACTGGGGCCAGGGAACCCTGGTCACCGTCTCGA
GC
SEQ ID NO: 30
EVQLLESGGGLVQPGGSLRLSCAASGFTFSSYAMSWVRQAPGKGLEWVSD
IWKQGMVTVYDSVKGRFTISRDNSKNTLYLQMNSLRAEDTAVYYCAKSSA
GFDYWGQGTLVTVSS
SEQ ID NO: 31
GAGGTGCAGCTGTTGGAGTCTGGGGGAGGCTTGGTACAGCCTGGGGGGTC
CCTGAGACTCTCCTGTGCAGCCTCTGGATTCACCTTTAGCAGCTATGCCA
TGAGCTGGGTCCGCCAGGCTCCAGGGAAGGGGCTGGAGTGGGTCTCATCG
ATTTGGAGGTAGGGTCTGGCGACAGCGAGCTTACGCAGACTCCGTGAAGG
GCCGGTTCACCATCTCCAGAGACAATTCCAAGAACACGCTGTATCTGCAA
ATGAACAGCCTGAGAGCCGAGGACACGGCCGTATATTACTGTGCGAAATC
TTCTGCTGGTTTTGACTACTGGGGCCAGGGAACCCTGGTCACCGTCTCGA
GC
SEQ ID NO: 32
EVQLLESGGGLVQPGGSLRLSCAASGFTFSSYAMSWVRQAPGKGLEWVSS
IWRQGLATAYDSVKGRFTISRDNSKNTLYLQMNSLRAEDTAVYYCAKSSA
GFDYWGQGTLVTVSS
SEQ ID NO: 33
GAGGTGCAGCTGTTGGAGTCTGGGGGAGGCTTGGTACAGCCTGGGGGGTC
CCTGAGACTCTCCTGTGCAGCCTCTGGATTCACCTTTAGCAGCTATGCCA
TGAGCTGGGTCCGCCAGGCTCCAGGGAAGGGGCTGGAGTGGGTCTCAGAG
ATTGTGGCTACTGGTATTTTGACAAGTAGCTTACGCAGACTCCGTGAAGG
GCCGGTTCACCATCTCCAGAGACAATTCCAAGAACACGCTGTATCTGCAA
ATGAACAGCCTGAGAGCCGAGGACACGGCCGTATATTACTGTGCGAAATC
TTCTGCTGGTTTTGACTACTGGGGCCAGGGAACCCTGGTCACCGTCTCGA
GC
SEQ ID NO: 34
EVQLLESGGGLVQPGGSLRLSCAASGFTFSSYAMSWVRQAPGKGLEWVSE
IVATGILTSYDSVKGRFTISRDNSKNTLYLQMNSLRAEDTAVYYCAKSSA
GFDYWGQGTLVTVSS
SEQ ID NO: 35
GAGGTGCAGCTGTTGGAGTCTGGGGGAGGCTTGGTACAGCCTGGGGGGTC
CCTGAGACTCTCCTGTGCAGCCTCTGGATTCACCTTTAGCAGCTATGCCA
TGAGCTGGGTCCGCCAGGCTCCAGGGAAGGGGCTGGAGTGGGTCTCATCG
ATTGGTCGGTAGGGTTTGATTACAGTTAGCTTACGCAGACTCCGTGAAGG
GCCGGTTCACCATCTCCAGAGACAATTCCAAGAACACGCTGTATCTGCAA
ATGAACAGCCTGAGAGCCGAGGACACGGCCGTATATTACTGTGCGAAATC
TTCTGCTGGTTTTGACTACTGGGGCCAGGGAACCCTGGTCACCGTCTCGA
GC
SEQ ID NO: 36
EVQLLESGGGLVQPGGSLRLSCAASGFTFSSYAMSWVRQAPGKGLEWVSS
IGRQGLITVYDSVKGRFTISRDNSKNTLYLQMNSLRAEDTAVYYCAKSSA
GFDYWGQGTLVTVSS
SEQ ID NO: 37
GAGGTGCAGCTGTTGGAGTCTGGGGGAGGCTTGGTACAGCCTGGGGGGTC
CCTGAGACTCTCCTGTGCAGCCTCTGGATTCACCTTTAGCAGCTATGCCA
TGAGCTGGGTCCGCCAGGCTCCAGGGAAGGGGCTGGAGTGGGTCTCATCT
ATTTGGTATTAGGGTCTGGTGACAGTTAGCTTACGCAGACTCCGTGAAGG
GCCGGTTCACCATCTCCAGAGACAATTCCAAGAACACGCTGTATCTGCAA
ATGAACAGCCTGAGAGCCGAGGACACGGCCGTATATTACTGTGCGAAATC
TTCTGCTGGTTTTGACTACTGGGGCCAGGGAACCCTGGTCACCGTCTCGA
GC
SEQ ID NO: 38
EVQLLESGGGLVQPGGSLRLSCAASGFTFSSYAMSWVRQAPGKGLEWVSS
IWYQGLVTVYDSVKGRFTISRDNSKNTLYLQMNSLRAEDTAVYYCAKSSA
GFDYWGQGTLVTVSS
SEQ ID NO: 39
GAGGTGCAGCTGTTGGAGTCTGGGGGAGGCTTGGTACAGCCTGGGGGGTC
CCTGAGACTCTCCTGTGCAGCCTCTGGATTCACCTTTAGCAGCTATGCCA
TGAGCTGGGTCCGCCAGGCTCCAGGGAAGGGGCTGGAGTGGGTCTCAGAT
ATTTGGAAGTAGGGTTTTGCTACAGCGAGCTTACGCAGACTCCGTGAAGG
GCCGGTTCACCATCTCCAGAGACAATTCCAAGAACACGCTGTATCTGCAA
ATGAACAGCCTGAGAGCCGAGGACACGGCCGTATATTACTGTGCGAAATC
TTCTGCTGGTTTTGACTACTGGGGCCAGGGAACCCTGGTCACCGTCTCGA
GC
SEQ ID NO: 40
EVQLLESGGGLVQPGGSLRLSCAASGFTFSSYAMSWVRQAPGKGLEWVSD
IWKQGFATADSVKGRFTISRDNSKNTLYLQMNSLRAEDTAVYYCAKSSAG
FDYWGQGTLVTVSS
SEQ ID NO: 41
GAGGTGCAGCTGTTGGAGTCTGGGGGAGGCTTGGTACAGCCTGGGGGGTC
CCTGAGACTCTCCTGTGCAGCCTCTGGATTCACCTTTAGCAGCTATGCCA
TGAGCTGGGTCCGCCAGGCTCCAGGGAAGGGGCTGGAGTGGGTCTCAAGT
ATTTGGAAGTAGGGTATTGTGACAGTGAGCTTACGCAGACTCCGTGAAGG
GCCGGTTCACCATCTCCAGAGACAATTCCAAGAACACGCTGTATCTGCAA
ATGAACAGCCTGAGAGCCGAGGACACGGCCGTATATTACTGTGCGAAATC
TTCTGCTGGTTTTGACTACTGGGGCCAGGGAACCCTGGTCACCGTCTCGA
GC
SEQ ID NO: 42
EVQLLESGGGLVQPGGSLRLSCAASGFTFSSYAMSWVRQAPGKGLEWVSS
IWKQGIVTVYDSVKGRFTISRDNSKNTLYLQMNSLRAEDTAVYYCAKSSA
GFDYWGQGTLVTVSS
SEQ ID NO: 43
GAGGTGCAGCTGTTGGAGTCTGGGGGAGGCTTGGTACAGCCTGGGGGGTC
CCTGAGACTCTCCTGTGCAGCCTCTGGATTCACCTTTAGCAGCTATGCCA
TGAGCTGGGTCCGCCAGGCTCCAGGGAAGGGGCTGGAGTGGGTCTCATCG
ATTTGGAGGTAGGGTCTGGCGACAGCGAGCTTACGCAGACTCCGTGAAGG
GCCGGTTCACCATCTCCAGAGACAATTCCAAGAACACGCTGTATCTGCAA
ATGAACAGCCTGAGAGCCGAGGACACGGCCGTATATTACTGTGCGAAATC
TTCTGCTGGTTTTGACTACTGGGGCCAGGGAACCCTGGTCACCGTCTCGA
GC
SEQ ID NO: 44
EVQLLESGGGLVQPGGSLRLSCAASGFTFSSYAMSWVRQAPGKGLEWVSS
IWRQGLATAYDSVKGRFTISRDNSKNTLYLQMNSLRAEDTAVYYCAKSSA
GFDYWGQGTLVTVSS

### Example 4

### Isolation and Testing of Affinity Matured Anti-PDL1 Antibodies of the Embodiments

[0594] This Example demonstrates that matured PDL1 Fab-phage that bind human and mouse PDL1 can be converted into fully human IgG antibodies that retain human and show enhanced mouse PDL1 binding.

[0595] Production of fully human IgGs comprising the variable domains of the matured clones was accomplished using techniques similar to those described in PCT Publication No. WO 2010/081173. DNA encoding the variable domains of anti-PDL1 Fab-Phage clones C1, D1, G7, C05, G12 and combinations of heavy variable CDR3 domains of anti-PDL1 Fab-Phage clones C05 or G12 with anti-PDL1 Fab-Phage clones heavy variable CDR2 domains of B10, E10 or H9 were cloned into expression vectors for the expression of fully human IgGs. The light variable domains for each are identical to that of c60 (SEQ ID NO: 10). Light chain (Lc) variable domains were amplified from the Fab templates. Vector (LcpOP (modified from pCDNA3, Invitrogen, Carlsbad, Calif.)) and amplified DNA were cut with BsiWI and EcoRI overnight, combined by ligation and transformed into E. coli MC1061 cells. Heavy chain (Hc) variable domains were amplified from Fab templates. Fully human IgGs anti-PDL1 antibodies were expressed from transiently transfected HEK-293 cells and purified from the culture supernatant by Protein A chromatography.

[0596] The affinity matured anti-PDL1 antibodies were analyzed for their ability to bind human and mouse PDL1. Briefly human PDL1-Fc or mouse PDL1-Fc (R & D Systems, Minneapolis, Minn.) was adsorbed to the wells of a 96-well ELISA plate. Purified anti-PDL1 antibodies were applied to the plate and allowed to bind. Bound antibody was visualized with an anti-human IgG-HRP conjugate, Fab specific, (Sigma, St Louis, Mo., Cat #A0293-1ML) and developed with the chromogenic substrate TMB. FIGS. 5A and B show that combining the matured heavy variable CDR3 domains with the heavy variable CDR2 domains results in antibodies with enhanced affinity towards human PDL1. In addition, the combination of the matured heavy variable CDR2 domain C05 with the heavy variable CD3 domain H9 results in an antibody with high affinity for both human and mouse PDL1. Table 5 provides the SEQ ID NOs for the nucleic acid sequences and amino acids sequences of the respective variable heavy chains.

[0597] The anti-PDL1 antibodies C5H9, C5B10 and C5E10 were further characterized for their species specificity towards binding to PDL1 and other closely related proteins. Briefly human PDL1-Fc, mouse PDL1-Fc (R & D Systems, Minneapolis, Minn.) or cynomolgus monkey (cyno) PDL1-Fc (Sino biological) were adsorbed to the wells of a 96-well ELISA plate. Purified anti-PDL1 antibodies were applied to the plate and allowed to bind. Bound antibody was visualized with an anti-human IgG-HRP conjugate, Fab specific, (Sigma, St Louis, Mo.; Cat #A0293-1ML) and developed with the chromogenic substrate TMB. FIGS. 6A and 6B show that C5H9 binds to human and mouse PDL1 with near equal affinity and C5B10 and C5E10 only bind human PDL1. None of the antibodies tested bind to either human B7-1 (FIG. 6D) or human CD28 (FIG. 6C), two closely related proteins. FIG. 7A shows that anti-PDL1 antibody C5H9 binds with high and equal affinity to human, mouse and cyno PDL1, but not to human B7H3 (also referred to as B7-H3) (R&D Systems, Minneapolis, Minn.).

TABLE 5
Variable heavy domains of PDL1 antibodies of the embodiments

| VH | Nucleic acid sequence | Amino acid sequence |
|---|---|---|
| PDL1 C5H9 | SEQ ID NO: 45 | SEQ ID NO: 46 |
| PDL1 C5B10 | SEQ ID NO: 47 | SEQ ID NO: 48 |
| PDL1 C5E10 | SEQ ID NO: 49 | SEQ ID NO: 50 |
| PDL1 G12H9 | SEQ ID NO: 51 | SEQ ID NO: 52 |
| PDL1 G12B10 | SEQ ID NO: 53 | SEQ ID NO: 54 |
| PDL1 G12E10 | SEQ ID NO: 55 | SEQ ID NO: 56 |

SEQ ID NO: 45
GAGGTGCAGCTGTTGGAGTCTGGGGGAGGCTTGGTACAGCCTGGGGGGTC
CCTGAGACTCTCCTGTGCAGCCTCTGGATTCACCTTTAGCAGCTATGCCA
TGAGCTGGGTCCGCCAGGCTCCAGGCAAGGGGCTGGAGTGGTTCTCAAGT
ATTTGGCGGAATGGTATTGTTACAGTTTACGCAGACTCCGTGAAGGGCCG
GTTCACCATCTCCAGAGACAATTCCAAGAACACGCTGTATCTGCAAATGA
ACAGCCTGAGAGCCGAGGACACGGCCGTATATTACTGTGCGAAATGGTCT
GCTGCTTTTGACTACTGGGGCCAGGGAACCCTGGTCACCGTCTCGAGC
SEQ ID NO: 46
EVQLLESGGGLVQPGGSLRLSCAASGFTFSSYAMSWVRQAPGKGLEWVSS
IWRNGIVTVYADSVKGRFTISRDNSKNTLYLQMNSLRAEDTAVYYCAKWS
AAFDYWGQGTLVTVSS
SEQ ID NO: 47
GAGGTGCAGCTGTTGGAGTCTGGGGGAGGCTTGGTACAGCCTGGGGGGTC
CCTGAGACTCTCCTGTGCAGCCTCTGGATTCACCTTTAGCAGCTATGCCA
TGAGCTGGGTCCGCCAGGCTCCAGGGAAGGGGCTGGAGTGGGTCTCAAGT
ATTTGGCGGAATGGTATTGTTACAGTTTACGCAGACTCCGTGAAGGGCCG
GTTCACCATCTCCAGAGACAATTCCAAGAACACGCTGTATCTGCAAATGA
ACAGCCTGAGAGCCGAGGACACGGCCGTATATTACTGTGCGAAATGGTCT
GCTGGTTATGACTACTGGGGCCAGGGAACCCTGGTCACCGTCTCGAGC
SEQ ID NO: 48
EVQLLESGGGLVQPGGSLRLSCAASGFTFSSYAMSWVRQAPGKGLEWVSS
IWRNGIVTVYADSVKGRFTISRDNSKNTLYLQMNSLRAEDTAVYYCAKWS
AGYDYWGQGTLVTVSS
SEQ ID NO: 49
GAGGTGCAGCTGTTGGAGTCTGGGGGAGGCTTGGTACAGCCTGGGGGGTC
CCTGAGACTCTCCTGTGCAGCCTCTGGATTCACCTTTAGCAGCTATGCCA
TGAGCTGGGTCCGCCAGGCTCCAGGGAAGGGGCTGGAGTGGGTCTCAAGT
ATTTGGCGGAATGGTATTGTTACAGTTTACGCAGACTCCGTGAAGGGCCG
GTTCACCATCTCCAGAGACAATTCCAAGAACACGCTGTATCTGCAAATGA
ACAGCCTGAGAGCCGAGGACACGGCCGTATATTACTGTGCGAAATGGTCT
AAGGGTTTTGACTACTGGGGCCAGGGAACCCTGGTCACCGTCTCGAGC
SEQ ID NO: 50
EVQLLESGGGLVQPGGSLRLSCAASGFTFSSYAMSWVRQAPGKGLEWVSS
IWRNGIVTVYADSVKGRFTISRDNSKNTLYLQMNSLRAEDTAVYYCAKWS
KGFDYWGQGTLVTVSS
SEQ ID NO: 51
GAGGTGCAGCTGTTGGAGTCTGGGGGAGGCTTGGTACAGCCTGGGGGGTC
CCTGAGACTCTCCTGTGCAGCCTCTGGATTCACCTTTAGCAGCTATGCCA
TGAGCTGGGTCCGCCAGGCTCCAGGGAAGGGGCTGGAGTGGGTCTCATCT
ATTTGGTATCAGGGTCTGGTGACAGTTTACGCAGACTCCGTGAAGGGCCG
GTTCACCATCTCCAGAGACAATTCCAAGAACACGCTGTATCTGCAAATGA
ACAGCCTGAGAGCCGAGGACACGGCCGTATATTACTGTGCGAAATGGTCT
GCTGCTTTTGACTACTGGGGCCAGGGAACCCTGGTCACCGTCTCGAGC
SEQ ID NO: 52
EVQLLESGGGLVQPGGSLRLSCAASGFTFSSYAMetSWVRQAPGKGLEWV
SSIWYQGLVTVYADSVKGRFTISRDNSKNTLYLQMetNSLRAEDTAVYYC
AKWSAAFDYWGQGTLVTVSS
SEQ ID NO: 53
GAGGTGCAGCTGTTGGAGTCTGGGGGAGGCTTGGTACAGCCTGGGGGGTC
CCTGAGACTCTCCTGTGCAGCCTCTGGATTCACCTTTAGCAGCTATGCCA
TGAGCTGGGTCCGCCAGGCTCCAGGGAAGGGGCTGGAGTGGGTCTCAAGT
ATTTGGCGGAATGGTATTGTTACAGTTTACGCAGACTCCGTGAAGGGCCG
GTTCACCATCTCCAGAGACAATTCCAAGAACACGCTGTATCTGCAAATGA
ACAGCCTGAGAGCCGAGGACACGGCCGTATATTACTGTGCGAAATGGTCT
GCTGGTTATGACTACTGGGGCCAGGGAACCCTGGTCACCGTCTCGAGC
SEQ ID NO: 54
EVQLLESGGGLVQPGGSLRLSCAASGFTFSSYAMSWVRQAPGKGLEWVSS
IWYQGLVTVYADSVKGRFTISRDNSKNTLYLQMNSLRAEDTAVYYCAKWS
AGYDYWGQGTLVTVSS
SEQ ID NO: 55
GAGGTGCAGCTGTTGGAGTCTGGGGGAGGCTTGGTACAGCCTGGGGGGTC
CCTGAGACTCTCCTGTGCAGCCTCTGGATTCACCTTTAGCAGCTATGCCA
TGAGCTGGGTCCGCCAGGCTCCAGGGAAGGGGCTGGAGTGGGTCTCAAGT
ATTTGGCGGAATGGTATTGTTACAGTTTACGCAGACTCCGTGAAGGGCCG
GTTCACCATCTCCAGAGACAATTCCAAGAACACGCTGTATCTGCAAATGA
ACAGCCTGAGAGCCGAGGACACGGCCGTATATTACTGTGCGAAATGGTCT
AAGGGTTTTGACTACTGGGGCCAGGGAACCCTGGTCACCGTCTCGAGC
SEQ ID NO: 56
EVQLLESGGGLVQPGGSLRLSCAASGFTFSSYAMSWVRQAPGKGLEWVSS
IWYQGLVTVYADSVKGRFTISRDNSKNTLYLQMNSLRAEDTAVYYCAKWS
KGFDYWGQGTLVTVSS

### Example 5

### Germline Revisions in Anti-PDL1 Antibody C5H9 Light Variable Domain Enhances Manufacturability and Reduces Potential Immunogenicity

[0598] This example describes an additional anti-PDL1 antibody embodiment that exhibits reduced predicted immunogenicity, reduced aggregation, and improved expression.

[0599] In silico immunogenicity prediction, using ProPred revealed a strong potential epitope in CDR2 of the light variable domain of C5H9; anti-PDL1 antibody C5H9, also referred to herein as C5H9, comprises a light chain comprising SEQ ID NO: 12 and a heavy chain comprising SEQ ID NO: 46. Alignment of the light variable domain of C5H9 with human germline antibodies revealed two amino acids in CDR2 that when reverted to germline eliminated the predicted epitope. The residues are underlined and in bold text in the sequence shown below in SEQ ID NO: 12.

[0600] Furthermore, framework 4 of the C5H9 light chain was modified as indicated with bold italics in SEQ ID NO: 58 substituting glycine (G) for glutamine (Q) in the J region. This modification was aimed at increasing the flexibility of the junction between variable and constant regions, potentially reducing the tendency of C5H9 to form aggregates. The resultant DNA and amino acid sequences are described by SEQ ID NO: 57 and SEQ ID NO: 58, respectively. The resultant anti-PDL1 antibody, referred to herein as anti-PDL1 antibody C5H9v2, also referred to herein as C5H9v2, comprises a light chain comprising SEQ ID NO: 58 and a heavy chain comprising SEQ ID NO: 46.

SEQ ID NO: 12
DIQMTQSPSSLSASVGDRVTITCRASQSISSYLNWYQQKPGKAPKLLIYY
ASTLQSGVPSRFSGSGSGTDFTLTISSLQPEDFATYYCQQDNGYPSTFGQ
GTKVEIKR
SEQ ID NO: 57
GATATTCAGATGACCCAGAGCCCGAGCAGCCTGAGCGCGAGCGTGGGCGA
TCGCGTGACCATTACCTGCCGCGCGAGCCAGAGCATTAGCAGCTATCTGA
ACTGGTATCAGCAGAAACCGGGCAAAGCGCCGAAACTGCTGATTTATGCG
GCGAGCAGCCTGCAGAGCGGCGTGCCGAGCCGCTTTAGCGGCAGCGGCAG
CGGCACCGATTTTACCCTGACCATTAGCAGCCTGCAGCCGGAAGATTTTG
CGACCTATTATTGCCAGCAGGATAACGGCTATCCGAGCACCTTTGGCGGC
GGCACCAAAGTGGAAATTAAACGC
SEQ ID NO: 58
DIQMTQSPSSLSASVGDRVTITCRASQSISSYLNWYQQKPGKAPKLLIYA
ASSLQSGVPSRFSGSGSGTDFTLTISSLQPEDFATYYCQQDNGYPSTFG [symbol]
GTKVEIKR

[0601] FIGS. 8A and 8B show that germline revisions described in SEQ ID NO: 58 reduces the predicted immunogenicity (top panel) and aggregation potential, and increases the expression level by three fold.

### Example 6

### In Vitro Characterization of Anti-PDL1 Antibodies C5H9 and C5H9v2

[0602] This Example demonstrates the binding specificities and biological activities of anti-PDL1 antibodies of the disclosure.

[0603] Production of fully human IgGs comprising the variable domains of the matured clones was accomplished using techniques similar to those described in PCT Publication No. WO 2010/081173. DNA encoding the heavy variable domains of anti-PDL1 antibody C5H9 (nucleic acid SEQ ID NO: 45, amino acid SEQ ID NO: 46) were amplified and cloned into vectors for the expression of fully human IgGs. DNA encoding the light variable domains of anti-PDL1 antibody C5H9 (nucleic acid SEQ ID NO: 11; amino acid SEQ ID NO: 12) were amplified and cloned into vectors for the expression of fully human IgGs. Similarly, DNA encoding the heavy variable domains of anti-PDL1 antibody C5H9 (nucleic acid SEQ ID NO: 45; amino acid SEQ ID NO: 46) were amplified and cloned into vectors for the expression of chimeric mouse IgG2as. DNA encoding the light variable domains of anti-PDL1 antibody C5H9v2 (nucleic acid SEQ ID NO: 57, amino acid SEQ ID NO: 58) were amplified and cloned into vectors for the expression of chimeric mouse IgG2as. Fully human IgGs or chimeric mouse IgG2a anti-PDL1 antibodies were expressed from transiently transfected HEK-293 cells and purified from the culture supernatant by Protein A chromatography. Anti-PDL1 IgG antibody C5H9 comprises a heavy chain comprising a heavy variable domain comprising SEQ ID NO: 46 and a light chain comprising a light variable domain comprising SEQ ID NO: 12. Anti-PDL1 IgG antibody C5H9v2 comprises a heavy chain comprising a heavy variable domain comprising SEQ ID NO: 46 and a light chain comprising a light variable domain comprising SEQ ID NO: 58.

[0604] Anti-PDL1 antibody C5H9v2 was characterized for species specific binding to PDL1 and whether that antibody would bind a panel of human proteins. Briefly human PDL1-Fc, mouse PDL1-Fc (R & D Systems, Minneapolis, Minn.) or cynomolgus monkey (cyno) PDL1-Fc (Sino biological) was adsorbed to the wells of a 96-well ELISA plate. Purified anti-PDL1 antibodies C5H9 and C5H9v2 were applied to the plate and allowed to bind. Bound antibody was visualized with an anti-human IgG-HRP conjugate, Fab specific, (Sigma, St Louis, Mo.; Cat #A0293-1ML) and developed with the chromogenic substrate TMB. FIGS. 9A to C show that both anti-PDL1 antibodies C5H9 and C5H9v2 bind human, mouse and cyno PDL1 with near equal affinity. EC₅₀ values for anti-PDL1 antibody C5H9v2 to human, cyno, rat and mouse PDL1 were also similar: 0.25 nM, 0.28 nM, 0.31 nM, and 0.30 nM, respectively.

[0605] In a similar experiment the binding of anti-PDL1 antibody C5H9 was evaluated for binding to a panel of human and mouse proteins. Briefly, each protein, listed in FIG. 10A, was absorbed to the wells of an ELISA plate. Purified anti-PDL1 antibodies C5H9 and C5H9v2 were applied to the plate and allowed to bind. Bound antibody was visualized with an anti-human IgG-HRP conjugate, Fab specific, (Sigma, St Louis, Mo.; Cat #A0293-1ML) and developed with the chromogenic substrate TMB. Anti-PDL1 antibody C5H9v2 binds only to human and mouse PDL1 demonstrating specificity toward PDL1.

[0606] The biological activity of PDL1 is mediated through binding to PD1 and/or to B7-1. Blockade of binding is a desired characteristic for a therapeutic antibody; therefore, the potency of blocking the interaction of PDL1 with PD1 and B7-1 was measured. Briefly, human, mouse or cyno PDL1 was adsorbed to the well of an ELISA plate. Biotinylated human, mouse or cyno PD1 or B7-1 was applied to the wells in the absence or the presence of an increasing concentration of either anti-PDL1 antibody C5H9 or anti-PDL1 antibody C5H9v2 and allowed to bind. Bound biotinylated PD1 or B7-1 was visualized with a Streptavidin-HRP conjugate (Thermo Scientific, Cat. No. 21126) and developed with the chromogenic substrate TMB. FIG. 11A shows that both anti-PDL1 antibody C5H9 and anti-PDL1 antibody C5H9v2 are potent blockers of either B7-1 or PD1 binding to PDL1, and that blockade includes all three species human, cyno and mouse with single digit nM EC₅₀'s.

### Example 7

### An Anti-PDL1 Antibody of the Disclosure Accelerates Induction of Diabetes in NOD Mice

[0607] In this Example, anti-PDL1 antibody C5H9 was analyzed for the ability to induce diabetes in NOD mice.

[0608] The NOD mice, substrain NOD/ShiLtJ, were obtained from Jackson Laboratory at 6 weeks and acclimated on site for 1 week. At 7 weeks, mice were checked for diabetes prior to enrollment, grouped, and dosed as set forth in Table 6.

TABLE 6
Groups and Doses for NOD study

| | | | Dose | | | |
|---|---|---|---|---|---|---|
| | | | (mg/kg) | Dose | | |
| | | | Loading/ | volume | | |
| Group | Count | Treatment | regular | (mL/kg) | Schedule | Route |
| 1 | 6 | Control | 20/10 | 10 | d2d×6 | IP |
| 2 | 6 | Anti-PDL1 | 20/10 | 10 | q2d×6 | IP |
| | | (C5H9) | | | | |
| 3 | 6 | Anti-PDL1 | 20/10 | 10 | d2d×6 | IP |
| | | (10F9G2) | | | | |

[0609] FIG. 12A, which plots % non-diabetic versus number of days post initial dose, shows that anti-PDL1 antibody C5H9 antibody (Gr2-C5H9) induces diabetes in NOD mice similar to positive control anti-PDL1 antibody 10F9G2 antibody. A control rat IgG2b did not induce diabetes in NOD mice.

[0610] Anti-PDL1 antibody C5H9v2 was also tested for the ability to induce diabetes in NOD mice in a dose dependent matter, using a method similar to that described above, with 9-week old animals using the groups and doses set forth in Table 7.

TABLE 7
Groups and doses for dose dependent NOD study

| | | | | | Dose | | |
|---|---|---|---|---|---|---|---|
| | | | | Dose | volume | | |
| Group | Count | Gender | Treatment | (mg/kg) | (mL/kg) | Schedule | Route |
| 1 | 8 | F | mIgG2a (C1.18.4) | 25 | 10 | Single dose | IP |
| 2 | 8 | F | Anti-PDL1 (C5H9v2) | 25 | 10 | Single dose | IP |
| 3 | 8 | F | Anti-PDL1 (C5H9v2) | 5 | 10 | Single dose | IP |
| 4 | 8 | F | Anti-PDL1 (C5H9v2) | 1 | 10 | Single dose | IP |
| 5 | 8 | F | Anti-PDL1 (C5H9v2) | 0.2 | 10 | Single dose | IP |

[0611] FIG. 13A, which plots % non-diabetic versus number of days post initial dose, demonstrates that anti-PDL1 antibody C5H9v2 induces diabetes in NOD mice in a dose dependent matter.

### Example 8

### An Anti-PDL1 Antibody of the Embodiments Reduces MC38 Tumors in Mice

[0612] In this Example, anti-PDL1 antibody C5H9v2 was analyzed for the ability to reduce the growth of MC38 syngeneic tumors.

[0613] The mouse colon carcinoma cell line MC38 was obtained from ATCC (American Type Culture Collection, Manassas, Va.). MC38 cells were grown in RPMI-1640 supplemented with 10% fetal bovine serum at 37° C. in an atmosphere of 5% CO₂ in air. Cells were harvested during the logarithmic growth period, resuspended in PBS, and kept on ice for tumor induction.

[0614] Each mouse was inoculated subcutaneously at the right flank with 1×10⁶ of MC38 cells in PBS for tumor development. The treatments were started when the mean tumor size reached approximately 100-200 mm³ (no more than 200 mm³). Tumor sizes were measured twice weekly in two dimensions using a caliper, and the volume was expressed in mm³ using the formula: V=0.5 a×b² where a and b are the long and short diameters of the tumor, respectively.

[0615] The mice were grouped and dosed as set forth in Table 8.

TABLE 8
Groups and doses for MC38 syngeneic study

| | | | Dose | Dose | | |
|---|---|---|---|---|---|---|
| | | | (mg/ | volume | | |
| Group | Count | Treatment | kg) | (mL/kg) | Schedule | Route |
| 1 | 10 | Anti-PDL1 | 10 | 10 | t.i.w. for 2 | IP |
| | | (10F9G2) | | | weeks (MWF) | |
| 2 | 10 | Anti-PDL1 | 10 | 10 | t.i.w. for 2 | IP |
| | | (C5H9v2) | | | weeks (MWF) | |
| 3 | 10 | mIgG2a + | 10 | 10 | t.i.w. for 2 | IP |
| | | Hamster | | | weeks (MWF) | |
| | | IgG1 | | | | |

[0616] FIG. 14A, which plots tumor volume versus number of days post initial dose, demonstrates that anti-PDL1 antibody C5H9v2 inhibits the growth of MC38 syngeneic tumors similar to positive control anti-PDL1 antibody 10F9G2.

### Example 9

### Anti-PDL1 Activatable Antibody C5H9v2 Masking Moieties

[0617] This Example describes identification of masking moieties (MM) to reduce binding of activatable antibodies of anti-PDL1 antibody C5H9v2 to their target.

[0618] Anti-PDL1 antibody C5H9v2 and Fab were used to screen the libraries using a method similar to that described in PCT International Publication Number WO 2010/081173, published 15 Jul. 2010. The screening consisted of one round of MACS and three rounds of FACS sorting. The initial MACS was done with protein-A Dynabeads (Invitrogen) and the anti-PDL1 antibody C5H9v2 at a concentration of 100 nM. For MACS, approximately 1×10¹¹ cells were screened for binding and 6×10⁶ cells were collected. Anti-PDL1 antibody C5H9v2, directly labeled with Alexafluor-488, was used as a probe for all FACS selections. In the first round of FACS, the cells were labeled with 100 nM AlexaFluor-anti-PDL1 antibody C5H9v2. In the second round of FACS, the cells were labeled with 10 nM AlexaFluor-anti-PDL1 antibody C5H9v2. In the third round of FACS, the cells were labeled with 1 nM AlexaFluor-anti-PDL1 antibody C5H9v2. The positive population from the third FACS round was verified to be inhibited by recombinant human PDL1 protein from binding to the anti-PDL1 antibody C5H9v2 and Fab. Individual peptide clones were identified by sequence analysis and subsequently verified for their ability to bind the anti-PDL1 antibody C5H9v2 and Fab.

[0619] The sequences of the anti-PDL1 antibody C5H9v2 masking moieties are listed in Table 9.

TABLE 9
anti-PDL1 antibody C5H9v2 masking moieties (MM)

| MM | Amino Acid Sequence | SEQ ID NO |
|---|---|---|
| PL01 | YCEVSELFVLPWCMG | SEQ ID NO: 208 |
| PL02 | SCLMHPHYAHDYCYV | SEQ ID NO: 426 |
| PL03 | LCEVLMLLQHPWCMG | SEQ ID NO: 59 |
| PL04 | IACRHFMEQLPFCHH | SEQ ID NO: 60 |
| PL05 | FGPRCGEASTCVPYE | SEQ ID NO: 61 |
| PL06 | ILYCDSWGAGCLTRP | SEQ ID NO: 62 |
| PL07 | GIALCPSHFCQLPQT | SEQ ID NO: 63 |
| PL08 | DGPRCFVSGECSPIG | SEQ ID NO: 64 |
| PL09 | LCYKLDYDDRSYCHI | SEQ ID NO: 65 |
| PL10 | PCHPHPYBARPYCNV | SEQ ID NO: 66 |
| PL11 | PCYWHPFFAYRYCNT | SEQ ID NO: 67 |
| PL12 | VCYYMBWLGRNWCSS | SEQ ID NO: 68 |
| PL13 | LCDLFKLREFPYCMG | SEQ ID NO: 69 |
| PL14 | YLPCHFVPIGACNNK | SEQ ID NO: 70 |
| PL15 | IFCHMGVVVPQCANY | SEQ ID NO: 71 |
| PL16 | ACHPHPYBARPYCNV | SEQ ID NO: 72 |
| PL17 | PCHPAPYBARPYCNV | SEQ ID NO: 73 |
| PL18 | PCHPHAYDARPYCNV | SEQ ID NO: 74 |
| PL19 | PCHPHPADARPYCNV | SEQ ID NO: 75 |
| PL20 | PCHPHPYAARPYCNV | SEQ ID NO: 76 |
| PL21 | PCHPHPYDAAPYCNV | SEQ ID NO: 77 |
| PL22 | PCHPHPYDARPACNV | SEQ ID NO: 78 |
| PL23 | PCHPHPYDARPYCAV | SEQ ID NO: 79 |
| PL24 | PCHAHPYBARPYCNV | SEQ ID NO: 80 |
| PL25 | PCHPHPYDARAYCNV | SEQ ID NO: 81 |

### Example 10

### Activatable Antibodies Comprising Anti-PDL1 Antibody C5H9v2

[0620] This Example describes examples of activatable antibodies of the disclosure comprising anti-PDL1 antibody C5H9v2.

[0621] Anti-PDL1 activatable antibodies comprising an anti-PDL1 antibody C5H9v2 masking moiety, a cleavable moiety, and anti-PDL1 antibody C5H9v2 were produced according to methods similar to those described in PCT Publication Nos. WO 2009/025846 and WO 2010/081173. Quality control of the resultant activatable antibodies indicated that most comprised at least 95% monomer. The amino acid and nucleic acid sequences of several activatable antibodies comprising anti-PDL1 antibody C5H9v2 are provided below. Each activatable antibody comprises anti-PDL1 antibody C5H9v2 having the variable heavy chain amino acid sequence shown in SEQ ID NO: 46 and a light chain amino acid sequence selected from the group consisting of the amino acid sequences shown in SEQ ID NO: 83, 85, 87, 89, 91, 93, 95, 97, 99, 101, 103, 105, 107, 109, 111, 113, 115, 117, 119, 121, 123, 125, 127, 129, 131, 133, 135, 137, 139, 141, 143, 145, 147, 149, 151, 153, 155, 157, 931, 933, 935, 937, 939, 941, 943, 945, 947, 949, 951, 953, 955, 957, 959, 961, 963, 965, 967, 969, 971, 973, 975, 977, 979, 981, 983, 985, 987, 989, 991, 993, 995, 997, 999, 1001, 1003, 1005, 1144-1191, 1200, and 1201 below.

[0622] While the sequences shown below include the spacer sequence of SEQ ID NO: 923, those of ordinary skill in the art appreciate that the activatable anti-PDL1 antibodies of the disclosure can include any suitable spacer sequence, such as, for example, a spacer sequence selected from the group consisting of QGQSGS (SEQ ID NO: 923); GQSGS (SEQ ID NO: 1192); QSGS (SEQ ID NO: 1193); SGS (SEQ ID NO: 1194); GS (SEQ ID NO: 1195); S; QGQSGQG (SEQ ID NO: 924); GQSGQG (SEQ ID NO: 395); QSGQG (SEQ ID NO: 925); SGQG (SEQ ID NO: 926); GQG (SEQ ID NO: 927); QG (SEQ ID NO: 928); G; QGQSGQ (SEQ ID NO: 1196); GQSGQ (SEQ ID NO: 1197); QSGQ (SEQ ID NO: 1198); SGQ (SEQ ID NO: 1198); GQ (SEQ ID NO: 1199); and Q. While the sequences shown below include the spacer sequence of SEQ ID NO: 923, those of ordinary skill in the art will also appreciate that activatable anti-PDL1 antibodies of the disclosure in some embodiments do not include a spacer sequence.

C5H9v2 VH amino acid sequence
(SEQ ID NO: 46)
EVQLLESGGGLVQPGGSLRLSCAASGFTFSSYAMSWVRQAPGKGLEWVSSIWRNGIVTVYADSVKGRFTI
SRDNSKNTLYLQMNSLRAEDTAVYYCAKWSAAFDYWGQGTLVTVSS
[spacer (SEQ ID NO: 929)][PL01-0003 LC (SEQ ID NO: 930)]
(SEQ ID NO: 82)
[CAAGGTCAGTCTGGATCC][TATTGCGAGGTTAGTGAGCTGTTTGTTCTTCCTTGGTGCATGGGTGGAG
GTGGCTCGAGCGGTGGCAGCGGTGGCTCTGGTGGTACTAGCACCTCTGGTCGTTCCGCTAACCCACGTGG
CGGCGGTTCTGACATCCAGATGACCCAGAGCCCCAGCAGCCTGTCTGCTAGCGTGGGCGACAGAGTGACC
ATCACCTGTAGAGCCAGCCAGAGCATCAGCAGCTACCTGAACTGGTATCAGCAGAAGCCCGGCAAGGCCC
CCAAACTGCTGATCTACGCCGCCAGCTCTCTGCAGTCTGGCGTGCCCAGCAGATTTTCCGGCAGCGGCTC
TGGCACCGACTTCACCCTGACCATCAGCTCCCTGCAGCCCGAGGACTTCGCCACCTACTACTGCCAGCAG
GACAACGGCTACCCCAGCACCTTTGGCGGAGGTACCAAGGTGGAAATCAAGCGTTGTGAGGCCACTCACA
AGACATCAACTTCACCCATTGTCAAGAGCTTCAACAGGAATGAGTGT]
[spacer (SEQ ID NO: 923)][PL01-0003 LC (SEQ ID NO: 931)]
(SEQ ID NO: 83)
[QGQSGS][YCEVSELFVLPWCMGGGGSSGGSGGSGGTSTSGRSANPRGGGSDIQMTQSPSSLSASVGDR
VTITCRASQSISSYLNWYQQKPGKAPKLLIYAASSLQSGVPSRFSGSGSGTDFTLTISSLQPEDFATYYC
QQDNGYPSTFGGGTKVEIKR]
PL01-0003 LC nucleotide sequence
(SEQ ID NO: 930)
TATTGCGAGGTTAGTGAGCTGTTTGTTCTTCCTTGGTGCATGGGTGGAGGTGGCTCGAGCGGTGGCAGCG
GTGGCTCTGGTGGTACTAGCACCTCTGGTCGTTCCGCTAACCCACGTGGCGGCGGTTCTGACATCCAGAT
GACCCAGAGCCCCAGCAGCCTGTCTGCTAGCGTGGGCGACAGAGTGACCATCACCTGTAGAGCCAGCCAG
AGCATCAGCAGCTACCTGAACTGGTATCAGCAGAAGCCCGGCAAGGCCCCCAAACTGCTGATCTACGCCG
CCAGCTCTCTGCAGTCTGGCGTGCCCAGCAGATTTTCCGGCAGCGGCTCTGGCACCGACTTCACCCTGAC
CATCAGCTCCCTGCAGCCCGAGGACTTCGCCACCTACTACTGCCAGCAGGACAACGGCTACCCCAGCACC
TTTGGCGGAGGTACCAAGGTGGAAATCAAGCGTTGTGAGGCCACTCACAAGACATCAACTTCACCCATTG
TCAAGAGCTTCAACAGGAATGAGTGT
PL01-0003 LC amino acid sequence
(SEQ ID NO: 931)
YCEVSELFVLPWCMGGGGSSGGSGGSGGTSTSGRSANPRGGGSDIQMTQSPSSLSASVGDRVTITCRASQ
SISSYLNWYQQKPGKAPKLLIYAASSLQSGVPSRFSGSGSGTDFTLTISSLQPEDFATYYCQQDNGYPST
FGGGTKVEIKR
[spacer (SEQ ID NO: 929)][PL02-0003 LC (SEQ ID NO: 932)]
(SEQ ID NO: 84)
[CAAGGTCAGTCTGGATCC][TCTTGCCTTATGCATCCGCATTATGCTCATGATTATTGCTATGTTGGAG
GTGGCTCGAGCGGTGGCAGCGGTGGCTCTGGTGGTACTAGCACCTCTGGTCGTTCCGCTAACCCACGTGG
CGGCGGTTCTGACATCCAGATGACCCAGAGCCCCAGCAGCCTGTCTGCTAGCGTGGGCGACAGAGTGACC
ATCACCTGTAGAGCCAGCCAGAGCATCAGCAGCTACCTGAACTGGTATCAGCAGAAGCCCGGCAAGGCCC
CCAAACTGCTGATCTACGCCGCCAGCTCTCTGCAGTCTGGCGTGCCCAGCAGATTTTCCGGCAGCGGCTC
TGGCACCGACTTCACCCTGACCATCAGCTCCCTGCAGCCCGAGGACTTCGCCACCTACTACTGCCAGCAG
GACAACGGCTACCCCAGCACCTTTGGCGGAGGTACCAAGGTGGAAATCAAGCGTTGTGAGGCCACTCACA
AGACATCAACTTCACCCATTGTCAAGAGCTTCAACAGGAATGAGTGT]
[spacer (SEQ ID NO: 923)][PL02-0003 LC (SEQ ID NO: 933)]
(SEQ ID NO: 85)
[QGQSGS][SCLMHPHYAHDYCYVGGGSSGGSGGSGGTSTSGRSANPRGGGSDIQMTQSPSSLSASVGDR
VTITCRASQSISSYLNWYQQKPGKAPKLLIYAASSLQSGVPSRFSGSGSGTDFTLTISSLQPEDFATYYC
QQDNGYPSTFGGGTKVEIKR]
PL02-0003 LC nucleotide sequence
(SEQ ID NO: 932)
TCTTGCCTTATGCATCCGCATTATGCTCATGATTATTGCTATGTTGGAGGTGGCTCGAGCGGTGGCAGCG
GTGGCTCTGGTGGTACTAGCACCTCTGGTCGTTCCGCTAACCCACGTGGCGGCGGTTCTGACATCCAGAT
GACCCAGAGCCCCAGCAGCCTGTCTGCTAGCGTGGGCGACAGAGTGACCATCACCTGTAGAGCCAGCCAG
AGCATCAGCAGCTACCTGAACTGGTATCAGCAGAAGCCCGGCAAGGCCCCCAAACTGCTGATCTACGCCG
CCAGCTCTCTGCAGTCTGGCGTGCCCAGCAGATTTTCCGGCAGCGGCTCTGGCACCGACTTCACCCTGAC
CATCAGCTCCCTGCAGCCCGAGGACTTCGCCACCTACTACTGCCAGCAGGACAACGGCTACCCCAGCACC
TTTGGCGGAGGTACCAAGGTGGAAATCAAGCGTTGTGAGGCCACTCACAAGACATCAACTTCACCCATTG
TCAAGAGCTTCAACAGGAATGAGTGT
PL02-0003 LC amino acid sequence
(SEQ ID NO: 933)
SCLMHPHYAHDYCYVGGGSSGGSGGSGGTSTSGRSANPRGGGSDIQMTQSPSSLSASVGDRVTITCRASQ
SISSYLNWYQQKPGKAPKLLIYAASSLQSGVPSRFSGSGSGTDFTLTISSLQPEDFATYYCQQDNGYPST
FGGGTKVEIKR
[spacer (SEQ ID NO: 929)][PL03-0003 LC (SEQ ID NO: 934)]
(SEQ ID NO: 86)
[CAAGGTCAGTCTGGATCC][TTGTGCGAGGTTTTGATGTTGTTGCAGCATCCGTGGTGCATGGGGGGAG
GTGGCTCGAGCGGTGGCAGCGGTGGCTCTGGTGGTACTAGCACCTCTGGTCGTTCCGCTAACCCACGTGG
CGGCGGTTCTGACATCCAGATGACCCAGAGCCCCAGCAGCCTGTCTGCTAGCGTGGGCGACAGAGTGACC
ATCACCTGTAGAGCCAGCCAGAGCATCAGCAGCTACCTGAACTGGTATCAGCAGAAGCCCGGCAAGGCCC
CCAAACTGCTGATCTACGCCGCCAGCTCTCTGCAGTCTGGCGTGCCCAGCAGATTTTCCGGCAGCGGCTC
TGGCACCGACTTCACCCTGACCATCAGCTCCCTGCAGCCCGAGGACTTCGCCACCTACTACTGCCAGCAG
GACAACGGCTACCCCAGCACCTTTGGCGGAGGTACCAAGGTGGAAATCAAGCGTTGTGAGGCCACTCACA
AGACATCAACTTCACCCATTGTCAAGAGCTTCAACAGGAATGAGTGT]
[spacer (SEQ ID NO: 923)][PL03-0003 LC (SEQ ID NO: 935)]
(SEQ ID NO: 87)
[QGQSGS][LCEVLMLLQHPWCMGGGGSSGGSGGSGGTSTSGRSANPRGGGSDIQMTQSPSSLSASVGDR
VTITCRASQSISSYLNWYQQKPGKAPKLLIYAASSLQSGVPSRFSGSGSGTDFTLTISSLQPEDFATYYC
QQDNGYPSTFGGGTKVEIKR]
PL03-0003 LC nucleotide sequence
(SEQ ID NO: 934)
TTGTGCGAGGTTTTGATGTTGTTGCAGCATCCGTGGTGCATGGGGGGAGGTGGCTCGAGCGGTGGCAGCG
GTGGCTCTGGTGGTACTAGCACCTCTGGTCGTTCCGCTAACCCACGTGGCGGCGGTTCTGACATCCAGAT
GACCCAGAGCCCCAGCAGCCTGTCTGCTAGCGTGGGCGACAGAGTGACCATCACCTGTAGAGCCAGCCAG
AGCATCAGCAGCTACCTGAACTGGTATCAGCAGAAGCCCGGCAAGGCCCCCAAACTGCTGATCTACGCCG
CCAGCTCTCTGCAGTCTGGCGTGCCCAGCAGATTTTCCGGCAGCGGCTCTGGCACCGACTTCACCCTGAC
CATCAGCTCCCTGCAGCCCGAGGACTTCGCCACCTACTACTGCCAGCAGGACAACGGCTACCCCAGCACC
TTTGGCGGAGGTACCAAGGTGGAAATCAAGCGTTGTGAGGCCACTCACAAGACATCAACTTCACCCATTG
TCAAGAGCTTCAACAGGAATGAGTGT
PL03-0003 LC amino acid sequence
(SEQ ID NO: 935)
LCEVLMLLQHPWCMGGGGSSGGSGGSGGTSTSGRSANPRGGGSDIQMTQSPSSLSASVGDRVTITCRASQ
SISSYLNWYQQKPGKAPKLLIYAASSLQSGVPSRFSGSGSGTDFTLTISSLQPEDFATYYCQQDNGYPST
FGGGTKVEIKR
[spacer (SEQ ID NO: 929)][PL04-0003 LC (SEQ ID NO: 936)]
(SEQ ID NO: 88)
[CAAGGTCAGTCTGGATCC][ATTGCGTGCCGGCATTTTATGGAGCAGTTGCCGTTTTGCCATCATGGAG
GTGGCTCGAGCGGTGGCAGCGGTGGCTCTGGTGGTACTAGCACCTCTGGTCGTTCCGCTAACCCACGTGG
CGGCGGTTCTGACATCCAGATGACCCAGAGCCCCAGCAGCCTGTCTGCTAGCGTGGGCGACAGAGTGACC
ATCACCTGTAGAGCCAGCCAGAGCATCAGCAGCTACCTGAACTGGTATCAGCAGAAGCCCGGCAAGGCCC
CCAAACTGCTGATCTACGCCGCCAGCTCTCTGCAGTCTGGCGTGCCCAGCAGATTTTCCGGCAGCGGCTC
TGGCACCGACTTCACCCTGACCATCAGCTCCCTGCAGCCCGAGGACTTCGCCACCTACTACTGCCAGCAG
GACAACGGCTACCCCAGCACCTTTGGCGGAGGTACCAAGGTGGAAATCAAGCGTTGTGAGGCCACTCACA
AGACATCAACTTCACCCATTGTCAAGAGCTTCAACAGGAATGAGTGT]
[spacer (SEQ ID NO: 923)][PL04-0003 LC (SEQ ID NO: 937)]
(SEQ ID NO: 89)
[QGQSGS][IACRHFMEQLPFCKHGGGSSGGSGGSGGTSTSGRSANPRGGGSDIQMTQSPSSLSASVGDR
VTITCRASQSISSYLNWYQQKPGKAPKLLIYAASSLQSGVPSRFSGSGSGTDFTLTISSLQPEDFATYYC
QQDNGYPSTFGGGTKVEIKR]
PL04-0003 LC nucleotide sequence
(SEQ ID NO: 89)
ATTGCGTGCCGGCATTTTATGGAGCAGTTGCCGTTTTGCCATCATGGAGGTGGCTCGAGCGGTGGCAGCG
GTGGCTCTGGTGGTACTAGCACCTCTGGTCGTTCCGCTAACCCACGTGGCGGCGGTTCTGACATCCAGAT
GACCCAGAGCCCCAGCAGCCTGTCTGCTAGCGTGGGCGACAGAGTGACCATCACCTGTAGAGCCAGCCAG
AGCATCAGCAGCTACCTGAACTGGTATCAGCAGAAGCCCGGCAAGGCCCCCAAACTGCTGATCTACGCCG
CCAGCTCTCTGCAGTCTGGCGTGCCCAGCAGATTTTCCGGCAGCGGCTCTGGCACCGACTTCACCCTGAC
CATCAGCTCCCTGCAGCCCGAGGACTTCGCCACCTACTACTGCCAGCAGGACAACGGCTACCCCAGCACC
TTTGGCGGAGGTACCAAGGTGGAAATCAAGCGTTGTGAGGCCACTCACAAGACATCAACTTCACCCATTG
TCAAGAGCTTCAACAGGAATGAGTGT
PL04-0003 LC amino acid sequence
(SEQ ID NO: 937)
IACRHFMEQLPFCHHGGGSSGGSGGSGGTSTSGRSANPRGGGSDIQMTQSPSSLSASVGDRVTITCRASQ
SISSYLNWYQQKPGKAPKLLIYAASSLQSGVPSRFSGSGSGTDFTLTISSLQPEDFATYYCQQDNGYPST
FGGGTKVEIKR
[spacer (SEQ ID NO: 929)][PL05-0003 LC (SEQ ID NO: 938)]
(SEQ ID NO: 90)
[CAAGGTCAGTCTGGATCC][TTTGGTCCTAGGTGCGGTGAGGCTTCTACTTGCGTTCCGTATGAGGGAG
GTGGCTCGAGCGGTGGCAGCGGTGGCTCTGGTGGTACTAGCACCTCTGGTCGTTCCGCTAACCCACGTGG
CGGCGGTTCTGACATCCAGATGACCCAGAGCCCCAGCAGCCTGTCTGCTAGCGTGGGCGACAGAGTGACC
ATCACCTGTAGAGCCAGCCAGAGCATCAGCAGCTACCTGAACTGGTATCAGCAGAAGCCCGGCAAGGCCC
CCAAACTGCTGATCTACGCCGCCAGCTCTCTGCAGTCTGGCGTGCCCAGCAGATTTTCCGGCAGCGGCTC
TGGCACCGACTTCACCCTGACCATCAGCTCCCTGCAGCCCGAGGACTTCGCCACCTACTACTGCCAGCAG
GACAACGGCTACCCCAGCACCTTTGGCGGAGGTACCAAGGTGGAAATCAAGCGTTGTGAGGCCACTCACA
AGACATCAACTTCACCCATTGTCAAGAGCTTCAACAGGAATGAGTGT]
[spacer (SEQ ID NO: 923)][PL05-0003 LC (SEQ ID NO: 939)]
(SEQ ID NO: 91)
[QGQSGS][FGPRCGEASTCVPYEGGGSSGGSGGSGGTSTSGRSANPRGGGSDIQMTQSPSSLSASVGDR
VTITCRASQSISSYLNWYQQKPGKAPKLLIYAASSLQSGVPSRFSGSGSGTDFTLTISSLQPEDFATYYC
QQDNGYPSTFGGGTKVEIKR]
PL05-0003 LC nucleotide sequence
(SEQ ID NO: 938)
TTTGGTCCTAGGTGCGGTGAGGCTTCTACTTGCGTTCCGTATGAGGGAGGTGGCTCGAGCGGTGGCAGCG
GTGGCTCTGGTGGTACTAGCACCTCTGGTCGTTCCGCTAACCCACGTGGCGGCGGTTCTGACATCCAGAT
GACCCAGAGCCCCAGCAGCCTGTCTGCTAGCGTGGGCGACAGAGTGACCATCACCTGTAGAGCCAGCCAG
AGCATCAGCAGCTACCTGAACTGGTATCAGCAGAAGCCCGGCAAGGCCCCCAAACTGCTGATCTACGCCG
CCAGCTCTCTGCAGTCTGGCGTGCCCAGCAGATTTTCCGGCAGCGGCTCTGGCACCGACTTCACCCTGAC
CATCAGCTCCCTGCAGCCCGAGGACTTCGCCACCTACTACTGCCAGCAGGACAACGGCTACCCCAGCACC
TTTGGCGGAGGTACCAAGGTGGAAATCAAGCGTTGTGAGGCCACTCACAAGACATCAACTTCACCCATTG
TCAAGAGCTTCAACAGGAATGAGTGT
PL05-0003 LC amino acid sequence
(SEQ ID NO: 939)
FGPRCGEASTCVPYEGGGSSGGSGGSGGTSTSGRSANPRGGGSDIQMTQSPSSLSASVGDRVTITCRASQ
SISSYLNWYQQKPGKAPKLLIYAASSLQSGVPSRFSGSGSGTDFTLTISSLQPEDFATYYCQQDNGYPST
FGGGTKVEIKR
[spacer (SEQ ID NO: 929)][PL06-0003 LC (SEQ ID NO: 940)]
(SEQ ID NO: 92)
[CAAGGTCAGTCTGGATCC][ATTCTTTATTGCGATAGTTGGGGGGCGGGGTGCTTGACGCGGCCGGGAG
GTGGCTCGAGCGGTGGCAGCGGTGGCTCTGGTGGTACTAGCACCTCTGGTCGTTCCGCTAACCCACGTGG
CGGCGGTTCTGACATCCAGATGACCCAGAGCCCCAGCAGCCTGTCTGCTAGCGTGGGCGACAGAGTGACC
ATCACCTGTAGAGCCAGCCAGAGCATCAGCAGCTACCTGAACTGGTATCAGCAGAAGCCCGGCAAGGCCC
CCAAACTGCTGATCTACGCCGCCAGCTCTCTGCAGTCTGGCGTGCCCAGCAGATTTTCCGGCAGCGGCTC
TGGCACCGACTTCACCCTGACCATCAGCTCCCTGCAGCCCGAGGACTTCGCCACCTACTACTGCCAGCAG
GACAACGGCTACCCCAGCACCTTTGGCGGAGGTACCAAGGTGGAAATCAAGCGTTGTGAGGCCACTCACA
AGACATCAACTTCACCCATTGTCAAGAGCTTCAACAGGAATGAGTGT]
[spacer (SEQ ID NO: 923)][PL06-0003 LC (SEQ ID NO: 941)]
(SEQ ID NO: 93)
[QGQSGS][ILYCDSWGAGCLTRPGGGSSGGSGGSGGTSTSGRSANPRGGGSDIQMTQSPSSLSASVGDR
VTITCRASQSISSYLNWYQQKPGKAPKLLIYAASSLQSGVPSRFSGSGSGTDFTLTISSLQPEDFATYYC
QQDNGYPSTFGGGTKVEIKR]
PL06-0003 LC nucleotide sequence
(SEQ ID NO: 940)
ATTCTTTATTGCGATAGTTGGGGGGCGGGGTGCTTGACGCGGCCGGGAGGTGGCTCGAGCGGTGGCAGCG
GTGGCTCTGGTGGTACTAGCACCTCTGGTCGTTCCGCTAACCCACGTGGCGGCGGTTCTGACATCCAGAT
GACCCAGAGCCCCAGCAGCCTGTCTGCTAGCGTGGGCGACAGAGTGACCATCACCTGTAGAGCCAGCCAG
AGCATCAGCAGCTACCTGAACTGGTATCAGCAGAAGCCCGGCAAGGCCCCCAAACTGCTGATCTACGCCG
CCAGCTCTCTGCAGTCTGGCGTGCCCAGCAGATTTTCCGGCAGCGGCTCTGGCACCGACTTCACCCTGAC
CATCAGCTCCCTGCAGCCCGAGGACTTCGCCACCTACTACTGCCAGCAGGACAACGGCTACCCCAGCACC
TTTGGCGGAGGTACCAAGGTGGAAATCAAGCGTTGTGAGGCCACTCACAAGACATCAACTTCACCCATTG
TCAAGAGCTTCAACAGGAATGAGTGT
PL06-0003 LC amino acid sequence
(SEQ ID NO: 941)
ILYCDSWGAGCLTRPGGGSSGGSGGSGGTSTSGRSANPRGGGSDIQMTQSPSSLSASVGDRVTITCRASQ
SISSYLNWYQQKPGKAPKLLIYAASSLQSGVPSRFSGSGSGTDFTLTISSLQPEDFATYYCQQDNGYPST
FGGGTKVEIKR
[spacer (SEQ ID NO: 929)][PL07-0003 LC (SEQ ID NO: 942)]
(SEQ ID NO: 94)
[CAAGGTCAGTCTGGATCC][GGGATTGCGTTGTGCCCGTCTCATTTTTGCCAGCTGCCTCAGACTGGAG
GTGGCTCGAGCGGTGGCAGCGGTGGCTCTGGTGGTACTAGCACCTCTGGTCGTTCCGCTAACCCACGTGG
CGGCGGTTCTGACATCCAGATGACCCAGAGCCCCAGCAGCCTGTCTGCTAGCGTGGGCGACAGAGTGACC
ATCACCTGTAGAGCCAGCCAGAGCATCAGCAGCTACCTGAACTGGTATCAGCAGAAGCCCGGCAAGGCCC
CCAAACTGCTGATCTACGCCGCCAGCTCTCTGCAGTCTGGCGTGCCCAGCAGATTTTCCGGCAGCGGCTC
TGGCACCGACTTCACCCTGACCATCAGCTCCCTGCAGCCCGAGGACTTCGCCACCTACTACTGCCAGCAG
GACAACGGCTACCCCAGCACCTTTGGCGGAGGTACCAAGGTGGAAATCAAGCGTTGTGAGGCCACTCACA
AGACATCAACTTCACCCATTGTCAAGAGCTTCAACAGGAATGAGTGT]
[spacer (SEQ ID NO: 923)][PL07-0003 LC (SEQ ID NO: 943)]
(SEQ ID NO: 95)
[QGQSGS][GIALCPSHFCQLPQTGGGSSGGSGGSGGTSTSGRSANPRGGGSDIQMTQSPSSLSASVGDR
VTITCRASQSISSYLNWYQQKPGKAPKLLIYAASSLQSGVPSRFSGSGSGTDFTLTISSLQPEDFATYYC
QQDNGYPSTFGGGTKVEIKR]
PL07-0003 LC nucleotide sequence
(SEQ ID NO: 942)
GGGATTGCGTTGTGCCCGTCTCATTTTTGCCAGCTGCCTCAGACTGGAGGTGGCTCGAGCGGTGGCAGCG
GTGGCTCTGGTGGTACTAGCACCTCTGGTCGTTCCGCTAACCCACGTGGCGGCGGTTCTGACATCCAGAT
GACCCAGAGCCCCAGCAGCCTGTCTGCTAGCGTGGGCGACAGAGTGACCATCACCTGTAGAGCCAGCCAG
AGCATCAGCAGCTACCTGAACTGGTATCAGCAGAAGCCCGGCAAGGCCCCCAAACTGCTGATCTACGCCG
CCAGCTCTCTGCAGTCTGGCGTGCCCAGCAGATTTTCCGGCAGCGGCTCTGGCACCGACTTCACCCTGAC
CATCAGCTCCCTGCAGCCCGAGGACTTCGCCACCTACTACTGCCAGCAGGACAACGGCTACCCCAGCACC
TTTGGCGGAGGTACCAAGGTGGAAATCAAGCGTTGTGAGGCCACTCACAAGACATCAACTTCACCCATTG
TCAAGAGCTTCAACAGGAATGAGTGT
PL07-0003 LC amino acid sequence
(SEQ ID NO: 943)
GIALCPSHFCQLPQTGGGSSGGSGGSGGTSTSGRSANPRGGGSDIQMTQSPSSLSASVGDRVTITCRASQ
SISSYLNWYQQKPGKAPKLLIYAASSLQSGVPSRFSGSGSGTDFTLTISSLQPEDFATYYCQQDNGYPST
FGGGTKVEIKR
[spacer (SEQ ID NO: 929)][PL08-0003 LC (SEQ ID NO: 944)]
(SEQ ID NO: 96)
[CAAGGTCAGTCTGGATCC][GATGGGCCGCGTTGCTTTGTGTCGGGGGAGTGCTCTCCGATTGGTGGAG
GTGGCTCGAGCGGTGGCAGCGGTGGCTCTGGTGGTACTAGCACCTCTGGTCGTTCCGCTAACCCACGTGG
CGGCGGTTCTGACATCCAGATGACCCAGAGCCCCAGCAGCCTGTCTGCTAGCGTGGGCGACAGAGTGACC
ATCACCTGTAGAGCCAGCCAGAGCATCAGCAGCTACCTGAACTGGTATCAGCAGAAGCCCGGCAAGGCCC
CCAAACTGCTGATCTACGCCGCCAGCTCTCTGCAGTCTGGCGTGCCCAGCAGATTTTCCGGCAGCGGCTC
TGGCACCGACTTCACCCTGACCATCAGCTCCCTGCAGCCCGAGGACTTCGCCACCTACTACTGCCAGCAG
GACAACGGCTACCCCAGCACCTTTGGCGGAGGTACCAAGGTGGAAATCAAGCGTTGTGAGGCCACTCACA
AGACATCAACTTCACCCATTGTCAAGAGCTTCAACAGGAATGAGTGT]
[spacer (SEQ ID NO: 923)][PL08-0003 LC (SEQ ID NO: 945)]
(SEQ ID NO: 97)
[QGQSGS][DGPRCFVSGECSPIGGGGSSGGSGGSGGTSTSGRSANPRGGGSDIQMTQSPSSLSASVGDR
VTITCRASQSISSYLNWYQQKPGKAPKLLIYAASSLQSGVPSRFSGSGSGTDFTLTISSLQPEDFATYYC
QQDNGYPSTFGGGTKVEIKR]
PL08-0003 LC nucleotide sequence
(SEQ ID NO: 944)
GATGGGCCGCGTTGCTTTGTGTCGGGGGAGTGCTCTCCGATTGGTGGAGGTGGCTCGAGCGGTGGCAGCG
GTGGCTCTGGTGGTACTAGCACCTCTGGTCGTTCCGCTAACCCACGTGGCGGCGGTTCTGACATCCAGAT
GACCCAGAGCCCCAGCAGCCTGTCTGCTAGCGTGGGCGACAGAGTGACCATCACCTGTAGAGCCAGCCAG
AGCATCAGCAGCTACCTGAACTGGTATCAGCAGAAGCCCGGCAAGGCCCCCAAACTGCTGATCTACGCCG
CCAGCTCTCTGCAGTCTGGCGTGCCCAGCAGATTTTCCGGCAGCGGCTCTGGCACCGACTTCACCCTGAC
CATCAGCTCCCTGCAGCCCGAGGACTTCGCCACCTACTACTGCCAGCAGGACAACGGCTACCCCAGCACC
TTTGGCGGAGGTACCAAGGTGGAAATCAAGCGTTGTGAGGCCACTCACAAGACATCAACTTCACCCATTG
TCAAGAGCTTCAACAGGAATGAGTGT
PL08-0003 LC amino acid sequence
(SEQ ID NO: 945)
DGPRCFVSGECSPIGGGGSSGGSGGSGGTSTSGRSANPRGGGSDIQMTQSPSSLSASVGDRVTITCRASQ
SISSYLNWYOQKPGKAPKLLIYAASSLQSGVPSRFSGSGSGTDFTLTISSLQPEDFATYYCQQDNGYPST
FGGGTKVEIKR
[spacer (SEQ ID NO: 929)][PL09-0003 LC (SEQ ID NO: 946)]
(SEQ ID NO: 98)
[CAAGGTCAGTCTGGATCC][TTGTGCTATAAGCTGGATTATGATGATAGGTCTTATTGCCATATTGGAG
GTGGCTCGAGCGGTGGCAGCGGTGGCTCTGGTGGTACTAGCACCTCTGGTCGTTCCGCTAACCCACGTGG
CGGCGGTTCTGACATCCAGATGACCCAGAGCCCCAGCAGCCTGTCTGCTAGCGTGGGCGACAGAGTGACC
ATCACCTGTAGAGCCAGCCAGAGCATCAGCAGCTACCTGAACTGGTATCAGCAGAAGCCCGGCAAGGCCC
CCAAACTGCTGATCTACGCCGCCAGCTCTCTGCAGTCTGGCGTGCCCAGCAGATTTTCCGGCAGCGGCTC
TGGCACCGACTTCACCCTGACCATCAGCTCCCTGCAGCCCGAGGACTTCGCCACCTACTACTGCCAGCAG
GACAACGGCTACCCCAGCACCTTTGGCGGAGGTACCAAGGTGGAAATCAAGCGTTGTGAGGCCACTCACA
AGACATCAACTTCACCCATTGTCAAGAGCTTCAACAGGAATGAGTGT]
[spacer (SEQ ID NO: 923)][PL09-0003 LC (SEQ ID NO: 947)]
(SEQ ID NO: 99)
[QGQSGS][LCYKLDYDDRSYCHIGGGSSGGSGGSGGTSTSGRSANPRGGGSDIQMTQSPSSLSASVGDR
VTITCRASQSISSYLNWYQQKPGKAPKLLIYAASSLQSGVPSRFSGSGSGTDFTLTISSLQPEDFATYYC
QQDNGYPSTFGGGTKVEIKR]
PL09-0003 LC nucleotide sequence
(SEQ ID NO: 946)
TTGTGCTATAAGCTGGATTATGATGATAGGTCTTATTGCCATATTGGAGGTGGCTCGAGCGGTGGCAGCG
GTGGCTCTGGTGGTACTAGCACCTCTGGTCGTTCCGCTAACCCACGTGGCGGCGGTTCTGACATCCAGAT
GACCCAGAGCCCCAGCAGCCTGTCTGCTAGCGTGGGCGACAGAGTGACCATCACCTGTAGAGCCAGCCAG
AGCATCAGCAGCTACCTGAACTGGTATCAGCAGAAGCCCGGCAAGGCCCCCAAACTGCTGATCTACGCCG
CCAGCTCTCTGCAGTCTGGCGTGCCCAGCAGATTTTCCGGCAGCGGCTCTGGCACCGACTTCACCCTGAC
CATCAGCTCCCTGCAGCCCGAGGACTTCGCCACCTACTACTGCCAGCAGGACAACGGCTACCCCAGCACC
TTTGGCGGAGGTACCAAGGTGGAAATCAAGCGTTGTGAGGCCACTCACAAGACATCAACTTCACCCATTG
TCAAGAGCTTCAACAGGAATGAGTGT
PL09-0003 LC amino acid sequence
(SEQ ID NO: 947)
LCYKLDYDDRSYCHIGGGSSGGSGGSGGTSTSGRSANPRGGGSDIQMTQSPSSLSASVGDRVTITCRASQ
SISSYLNWYQQKPGKAPKLLIYAASSLQSGVPSRFSGSGSGTDFTLTISSLQPEDFATYYCQQDNGYPST
FGGGTKVEIKR
[spacer (SEQ ID NO: 929)][PL10-0003 LC (SEQ ID NO: 948)]
(SEQ ID NO: 100)
[CAAGGTCAGTCTGGATCC][CCGTGCCATCCGCATCCTTATGATGCTCGTCCTTATTGCAATGTGGGAG
GTGGCTCGAGCGGTGGCAGCGGTGGCTCTGGTGGTACTAGCACCTCTGGTCGTTCCGCTAACCCACGTGG
CGGCGGTTCTGACATCCAGATGACCCAGAGCCCCAGCAGCCTGTCTGCTAGCGTGGGCGACAGAGTGACC
ATCACCTGTAGAGCCAGCCAGAGCATCAGCAGCTACCTGAACTGGTATCAGCAGAAGCCCGGCAAGGCCC
CCAAACTGCTGATCTACGCCGCCAGCTCTCTGCAGTCTGGCGTGCCCAGCAGATTTTCCGGCAGCGGCTC
TGGCACCGACTTCACCCTGACCATCAGCTCCCTGCAGCCCGAGGACTTCGCCACCTACTACTGCCAGCAG
GACAACGGCTACCCCAGCACCTTTGGCGGAGGTACCAAGGTGGAAATCAAGCGTTGTGAGGCCACTCACA
AGACATCAACTTCACCCATTGTCAAGAGCTTCAACAGGAATGAGTGT]
[spacer (SEQ ID NO: 923)][PL10-0003 LC (SEQ ID NO: 949)]
(SEQ ID NO: 101)
[QGQSGS][PCHPHPYDARPYCNVGGGSSGGSGGSGGTSTSGRSANPRGGGSDIQMTQSPSSLSASVGDR
VTITCRASQSISSYLNWYQQKPGKAPKLLIYAASSLQSGVPSRFSGSGSGTDFTLTISSLQPEDFATYYC
QQDNGYPSTFGGGTKVEIKR]
PL10-0003 LC nucleotide sequence
(SEQ ID NO: 948)
CCGTGCCATCCGCATCCTTATGATGCTCGTCCTTATTGCAATGTGGGAGGTGGCTCGAGCGGTGGCAGCG
GTGGCTCTGGTGGTACTAGCACCTCTGGTCGTTCCGCTAACCCACGTGGCGGCGGTTCTGACATCCAGAT
GACCCAGAGCCCCAGCAGCCTGTCTGCTAGCGTGGGCGACAGAGTGACCATCACCTGTAGAGCCAGCCAG
AGCATCAGCAGCTACCTGAACTGGTATCAGCAGAAGCCCGGCAAGGCCCCCAAACTGCTGATCTACGCCG
CCAGCTCTCTGCAGTCTGGCGTGCCCAGCAGATTTTCCGGCAGCGGCTCTGGCACCGACTTCACCCTGAC
CATCAGCTCCCTGCAGCCCGAGGACTTCGCCACCTACTACTGCCAGCAGGACAACGGCTACCCCAGCACC
TTTGGCGGAGGTACCAAGGTGGAAATCAAGCGTTGTGAGGCCACTCACAAGACATCAACTTCACCCATTG
TCAAGAGCTTCAACAGGAATGAGTGT
PL10-0003 LC amino acid sequence
(SEQ ID NO: 949)
PCHPHPYDARPYCNVGGGSSGGSGGSGGTSTSGRSANPRGGGSDIQMTQSPSSLSASVGDRVTITCRASQ
SISSYLNWYQQKPGKAPKLLIYAASSLQSGVPSRFSGSGSGTDFTLTISSLQPEDFATYYCQQDNGYPST
FGGGTKVEIKR
[spacer (SEQ ID NO: 929)][PL11-0003 LC (SEQ ID NO: 950)]
(SEQ ID NO: 102)
[CAAGGTCAGTCTGGATCC][CCTTGCTATTGGCATCCTTTTTTTGCGTATAGGTATTGCAATACTGGAG
GTGGCTCGAGCGGTGGCAGCGGTGGCTCTGGTGGTACTAGCACCTCTGGTCGTTCCGCTAACCCACGTGG
CGGCGGTTCTGACATCCAGATGACCCAGAGCCCCAGCAGCCTGTCTGCTAGCGTGGGCGACAGAGTGACC
ATCACCTGTAGAGCCAGCCAGAGCATCAGCAGCTACCTGAACTGGTATCAGCAGAAGCCCGGCAAGGCCC
CCAAACTGCTGATCTACGCCGCCAGCTCTCTGCAGTCTGGCGTGCCCAGCAGATTTTCCGGCAGCGGCTC
TGGCACCGACTTCACCCTGACCATCAGCTCCCTGCAGCCCGAGGACTTCGCCACCTACTACTGCCAGCAG
GACAACGGCTACCCCAGCACCTTTGGCGGAGGTACCAAGGTGGAAATCAAGCGTTGTGAGGCCACTCACA
AGACATCAACTTCACCCATTGTCAAGAGCTTCAACAGGAATGAGTGT]
[spacer (SEQ ID NO: 923)][PL11-0003 LC (SEQ ID NO: 951)]
(SEQ ID NO: 103)
[QGQSGS][PCYWHPFFAYRYCNTGGGSSGGSGGSGGTSTSGRSANPRGGGSDIQMTQSPSSLSASVGDR
VTITCRASQSISSYLNWYQQKPGKAPKLLIYAASSLQSGVPSRFSGSGSGTDFTLTISSLQPEDFATYYC
QQDNGYPSTFGGGTKVEIKR]
PL11-0003 LC nucleotide sequence
(SEQ ID NO: 950)
CCTTGCTATTGGCATCCTTTTTTTGCGTATAGGTATTGCAATACTGGAGGTGGCTCGAGCGGTGGCAGCG
GTGGCTCTGGTGGTACTAGCACCTCTGGTCGTTCCGCTAACCCACGTGGCGGCGGTTCTGACATCCAGAT
GACCCAGAGCCCCAGCAGCCTGTCTGCTAGCGTGGGCGACAGAGTGACCATCACCTGTAGAGCCAGCCAG
AGCATCAGCAGCTACCTGAACTGGTATCAGCAGAAGCCCGGCAAGGCCCCCAAACTGCTGATCTACGCCG
CCAGCTCTCTGCAGTCTGGCGTGCCCAGCAGATTTTCCGGCAGCGGCTCTGGCACCGACTTCACCCTGAC
CATCAGCTCCCTGCAGCCCGAGGACTTCGCCACCTACTACTGCCAGCAGGACAACGGCTACCCCAGCACC
TTTGGCGGAGGTACCAAGGTGGAAATCAAGCGTTGTGAGGCCACTCACAAGACATCAACTTCACCCATTG
TCAAGAGCTTCAACAGGAATGAGTGT
PL11-0003 LC amino acid sequence
(SEQ ID NO: 951)
PCYWHPFFAYRYCNTGGGSSGGSGGSGGTSTSGRSANPRGGGSDIQMTQSPSSLSASVGDRVTITCRASQ
SISSYLNWYQQKPGKAPKLLIYAASSLQSGVPSRFSGSGSGTDFTLTISSLQPEDFATYYCQQDNGYPST
FGGGTKVEIKR
[spacer (SEQ ID NO: 929)][PL12-0003 LC (SEQ ID NO: 952)]
(SEQ ID NO: 104)
[CAAGGTCAGTCTGGATCC][GTTTGCTATTATATGGATTGGTTGGGGCGGAATTGGTGCTCTTCGGGAG
GTGGCTCGAGCGGTGGCAGCGGTGGCTCTGGTGGTACTAGCACCTCTGGTCGTTCCGCTAACCCACGTGG
CGGCGGTTCTGACATCCAGATGACCCAGAGCCCCAGCAGCCTGTCTGCTAGCGTGGGCGACAGAGTGACC
ATCACCTGTAGAGCCAGCCAGAGCATCAGCAGCTACCTGAACTGGTATCAGCAGAAGCCCGGCAAGGCCC
CCAAACTGCTGATCTACGCCGCCAGCTCTCTGCAGTCTGGCGTGCCCAGCAGATTTTCCGGCAGCGGCTC
TGGCACCGACTTCACCCTGACCATCAGCTCCCTGCAGCCCGAGGACTTCGCCACCTACTACTGCCAGCAG
GACAACGGCTACCCCAGCACCTTTGGCGGAGGTACCAAGGTGGAAATCAAGCGTTGTGAGGCCACTCACA
AGACATCAACTTCACCCATTGTCAAGAGCTTCAACAGGAATGAGTGT]
[spacer (SEQ ID NO: 923)][PL12-0003 LC (SEQ ID NO: 953)]
(SEQ ID NO: 105)
[QGQSGS][VCYYMDWLGRNWCSSGGGSSGGSGGSGGTSTSGRSANPRGGGSDIQMTQSPSSLSASVGDR
VTITCRASQSISSYLNWYQQKPGKAPKLLIYAASSLQSGVPSRFSGSGSGTDFTLTISSLQPEDFATYYC
QQDNGYPSTFGGGTKVEIKR]
PL12-0003 LC nucleotide sequence
(SEQ ID NO: 952)
GTTTGCTATTATATGGATTGGTTGGGGCGGAATTGGTGCTCTTCGGGAGGTGGCTCGAGCGGTGGCAGCG
GTGGCTCTGGTGGTACTAGCACCTCTGGTCGTTCCGCTAACCCACGTGGCGGCGGTTCTGACATCCAGAT
GACCCAGAGCCCCAGCAGCCTGTCTGCTAGCGTGGGCGACAGAGTGACCATCACCTGTAGAGCCAGCCAG
AGCATCAGCAGCTACCTGAACTGGTATCAGCAGAAGCCCGGCAAGGCCCCCAAACTGCTGATCTACGCCG
CCAGCTCTCTGCAGTCTGGCGTGCCCAGCAGATTTTCCGGCAGCGGCTCTGGCACCGACTTCACCCTGAC
CATCAGCTCCCTGCAGCCCGAGGACTTCGCCACCTACTACTGCCAGCAGGACAACGGCTACCCCAGCACC
TTTGGCGGAGGTACCAAGGTGGAAATCAAGCGTTGTGAGGCCACTCACAAGACATCAACTTCACCCATTG
TCAAGAGCTTCAACAGGAATGAGTGT
PL12-0003 LC amino acid sequence
(SEQ ID NO: 953)
VCYYMDWLGRNWCSSGGGSSGGSGGSGGTSTSGRSANPRGGGSDIQMTQSPSSLSASVGDRVTITCRASQ
SISSYLNWYQQKPGKAPKLLIYAASSLQSGVPSRFSGSGSGTDFTLTISSLQPEDFATYYCQQDNGYPST
FGGGTKVEIKR
[spacer (SEQ ID NO: 929)][PL13-0003 LC (SEQ ID NO: 954)]
(SEQ ID NO: 106)
[CAAGGTCAGTCTGGATCC][CTGTGCGATCTGTTTAAGTTGCGTGAGTTTCCTTATTGCATGGGGGGAG
GTGGCTCGAGCGGTGGCAGCGGTGGCTCTGGTGGTACTAGCACCTCTGGTCGTTCCGCTAACCCACGTGG
CGGCGGTTCTGACATCCAGATGACCCAGAGCCCCAGCAGCCTGTCTGCTAGCGTGGGCGACAGAGTGACC
ATCACCTGTAGAGCCAGCCAGAGCATCAGCAGCTACCTGAACTGGTATCAGCAGAAGCCCGGCAAGGCCC
CCAAACTGCTGATCTACGCCGCCAGCTCTCTGCAGTCTGGCGTGCCCAGCAGATTTTCCGGCAGCGGCTC
TGGCACCGACTTCACCCTGACCATCAGCTCCCTGCAGCCCGAGGACTTCGCCACCTACTACTGCCAGCAG
GACAACGGCTACCCCAGCACCTTTGGCGGAGGTACCAAGGTGGAAATCAAGCGTTGTGAGGCCACTCACA
AGACATCAACTTCACCCATTGTCAAGAGCTTCAACAGGAATGAGTGT]
[spacer (SEQ ID NO: 923)][PL13-0003 LC (SEQ ID NO: 955)]
(SEQ ID NO: 107)
[QGQSGS][LCDLFKLREFPYCMGGGGSSGGSGGSGGTSTSGRSANPRGGGSDIQMTQSPSSLSASVGDR
VTITCRASQSISSYLNWYQQKPGKAPKLLIYAASSLQSGVPSRFSGSGSGTDFTLTISSLQPEDFATYYC
QQDNGYPSTFGGGTKVEIKR]
PL13-0003 LC nucleotide sequence
(SEQ ID NO: 954)
CTGTGCGATCTGTTTAAGTTGCGTGAGTTTCCTTATTGCATGGGGGGAGGTGGCTCGAGCGGTGGCAGCG
GTGGCTCTGGTGGTACTAGCACCTCTGGTCGTTCCGCTAACCCACGTGGCGGCGGTTCTGACATCCAGAT
GACCCAGAGCCCCAGCAGCCTGTCTGCTAGCGTGGGCGACAGAGTGACCATCACCTGTAGAGCCAGCCAG
AGCATCAGCAGCTACCTGAACTGGTATCAGCAGAAGCCCGGCAAGGCCCCCAAACTGCTGATCTACGCCG
CCAGCTCTCTGCAGTCTGGCGTGCCCAGCAGATTTTCCGGCAGCGGCTCTGGCACCGACTTCACCCTGAC
CATCAGCTCCCTGCAGCCCGAGGACTTCGCCACCTACTACTGCCAGCAGGACAACGGCTACCCCAGCACC
TTTGGCGGAGGTACCAAGGTGGAAATCAAGCGTTGTGAGGCCACTCACAAGACATCAACTTCACCCATTG
TCAAGAGCTTCAACAGGAATGAGTGT
PL13-0003 LC amino acid sequence
(SEQ ID NO: 955)
LCDLFKLREFPYCMGGGGSSGGSGGSGGTSTSGRSANPRGGGSDIQMTQSPSSLSASVGDRVTITCRASQ
SISSYLNWYOQKPGKAPKLLIYAASSLQSGVPSRFSGSGSGTDFTLTISSLQPEDFATYYCQQDNGYPST
FGGGTKVEIKR
[spacer (SEQ ID NO: 929)][PL14-0003 LC (SEQ ID NO: 956)]
(SEQ ID NO: 108)
[CAAGGTCAGTCTGGATCC][TATCTTCCGTGCCATTTTGTTCCGATTGGGGCTTGCAATAATAAGGGAG
GTGGCTCGAGCGGTGGCAGCGGTGGCTCTGGTGGTACTAGCACCTCTGGTCGTTCCGCTAACCCACGTGG
CGGCGGTTCTGACATCCAGATGACCCAGAGCCCCAGCAGCCTGTCTGCTAGCGTGGGCGACAGAGTGACC
ATCACCTGTAGAGCCAGCCAGAGCATCAGCAGCTACCTGAACTGGTATCAGCAGAAGCCCGGCAAGGCCC
CCAAACTGCTGATCTACGCCGCCAGCTCTCTGCAGTCTGGCGTGCCCAGCAGATTTTCCGGCAGCGGCTC
TGGCACCGACTTCACCCTGACCATCAGCTCCCTGCAGCCCGAGGACTTCGCCACCTACTACTGCCAGCAG
GACAACGGCTACCCCAGCACCTTTGGCGGAGGTACCAAGGTGGAAATCAAGCGTTGTGAGGCCACTCACA
AGACATCAACTTCACCCATTGTCAAGAGCTTCAACAGGAATGAGTGT[
[spacer (SEQ ID NO: 923)][PL14-0003 LC (SEQ ID NO: 957)]
(SEQ ID NO: 109)
[QGQSGS][YLPCHFVPIGACNNKGGGSSGGSGGSGGTSTSGRSANPRGGGSDIQMTQSPSSLSASVGDR
VTITCRASQSISSYLNWYQQKPGKAPKLLIYAASSLQSGVPSRFSGSGSGTDFTLTISSLQPEDFATYYC
QQDNGYPSTFGGGTKVEIKR]
PL14-0003 LC nucleotide sequence
(SEQ ID NO: 956)
TATCTTCCGTGCCATTTTGTTCCGATTGGGGCTTGCAATAATAAGGGAGGTGGCTCGAGCGGTGGCAGCG
GTGGCTCTGGTGGTACTAGCACCTCTGGTCGTTCCGCTAACCCACGTGGCGGCGGTTCTGACATCCAGAT
GACCCAGAGCCCCAGCAGCCTGTCTGCTAGCGTGGGCGACAGAGTGACCATCACCTGTAGAGCCAGCCAG
AGCATCAGCAGCTACCTGAACTGGTATCAGCAGAAGCCCGGCAAGGCCCCCAAACTGCTGATCTACGCCG
CCAGCTCTCTGCAGTCTGGCGTGCCCAGCAGATTTTCCGGCAGCGGCTCTGGCACCGACTTCACCCTGAC
CATCAGCTCCCTGCAGCCCGAGGACTTCGCCACCTACTACTGCCAGCAGGACAACGGCTACCCCAGCACC
TTTGGCGGAGGTACCAAGGTGGAAATCAAGCGTTGTGAGGCCACTCACAAGACATCAACTTCACCCATTG
TCAAGAGCTTCAACAGGAATGAGTGT
PL14-0003 LC amino acid sequence
(SEQ ID NO: 957)
YLPCHFVPIGACNNKGGGSSGGSGGSGGTSTSGRSANPRGGGSDIQMTQSPSSLSASVGDRVTITCRASQ
SISSYLNWYQQKPGKAPKLLIYAASSLQSGVPSRFSGSGSGTDFTLTISSLQPEDFATYYCQQDNGYPST
FGGGTKVEIKR
[spacer (SEQ ID NO: 929)][PL15-0003 LC (SEQ ID NO: 958)]
(SEQ ID NO: 110)
[CAAGGTCAGTCTGGATCC][ATTTTTTGCCATATGGGTGTTGTGGTTCCTCAGTGCGCGAATTATGGAG
GTGGCTCGAGCGGTGGCAGCGGTGGCTCTGGTGGTACTAGCACCTCTGGTCGTTCCGCTAACCCACGTGG
CGGCGGTTCTGACATCCAGATGACCCAGAGCCCCAGCAGCCTGTCTGCTAGCGTGGGCGACAGAGTGACC
ATCACCTGTAGAGCCAGCCAGAGCATCAGCAGCTACCTGAACTGGTATCAGCAGAAGCCCGGCAAGGCCC
CCAAACTGCTGATCTACGCCGCCAGCTCTCTGCAGTCTGGCGTGCCCAGCAGATTTTCCGGCAGCGGCTC
TGGCACCGACTTCACCCTGACCATCAGCTCCCTGCAGCCCGAGGACTTCGCCACCTACTACTGCCAGCAG
GACAACGGCTACCCCAGCACCTTTGGCGGAGGTACCAAGGTGGAAATCAAGCGTTGTGAGGCCACTCACA
AGACATCAACTTCACCCATTGTCAAGAGCTTCAACAGGAATGAGTGT]
[spacer (SEQ ID NO: 923)][PL15-0003 LC (SEQ ID NO: 959)]
(SEQ ID NO: 111)
[QGQSGS][IFCHMGVVPQCANYGGGSSGGSGGSGGTSTSGRSANPRGGGSDIQMTQSPSSLSASVGDR
VTITCRASQSISSYLNWYQQKPGKAPKLLIYAASSLQSGVPSRFSGSGSGTDFTLTISSLQPEDFATYYC
QQDNGYPSTFGGGTKVEIKR]
PL15-0003 LC nucleotide sequence
(SEQ ID NO: 958)
ATTTTTTGCCATATGGGTGTTGTGGTTCCTCAGTGCGCGAATTATGGAGGTGGCTCGAGCGGTGGCAGCG
GTGGCTCTGGTGGTACTAGCACCTCTGGTCGTTCCGCTAACCCACGTGGCGGCGGTTCTGACATCCAGAT
GACCCAGAGCCCCAGCAGCCTGTCTGCTAGCGTGGGCGACAGAGTGACCATCACCTGTAGAGCCAGCCAG
AGCATCAGCAGCTACCTGAACTGGTATCAGCAGAAGCCCGGCAAGGCCCCCAAACTGCTGATCTACGCCG
CCAGCTCTCTGCAGTCTGGCGTGCCCAGCAGATTTTCCGGCAGCGGCTCTGGCACCGACTTCACCCTGAC
CATCAGCTCCCTGCAGCCCGAGGACTTCGCCACCTACTACTGCCAGCAGGACAACGGCTACCCCAGCACC
TTTGGCGGAGGTACCAAGGTGGAAATCAAGCGTTGTGAGGCCACTCACAAGACATCAACTTCACCCATTG
TCAAGAGCTTCAACAGGAATGAGTGT
PL15-0003 LC amino acid sequence
(SEQ ID NO: 959)
IFCHMGVVVPQCANYGGGSSGGSGGSGGTSTSGRSANPRGGGSDIQMTQSPSSLSASVGDRVTITCRASQ
SISSYLNWYQQKPGKAPKLLIYAASSLQSGVPSRFSGSGSGTDFTLTISSLQPEDFATYYCQQDNGYPST
FGGGTKVEIKR
[spacer (SEQ ID NO: 929)][PL16-0003 LC (SEQ ID NO: 960)]
(SEQ ID NO: 112)
[CAAGGTCAGTCTGGATCC][GCGTGCCATCCGCATCCTTATGATGCTCGTCCTTATTGCAATGTGGGAG
GTGGCTCGAGCGGTGGCAGCGGTGGCTCTGGTGGTACTAGCACCTCTGGTCGTTCCGCTAACCCACGTGG
CGGCGGTTCTGACATCCAGATGACCCAGAGCCCCAGCAGCCTGTCTGCTAGCGTGGGCGACAGAGTGACC
ATCACCTGTAGAGCCAGCCAGAGCATCAGCAGCTACCTGAACTGGTATCAGCAGAAGCCCGGCAAGGCCC
CCAAACTGCTGATCTACGCCGCCAGCTCTCTGCAGTCTGGCGTGCCCAGCAGATTTTCCGGCAGCGGCTC
TGGCACCGACTTCACCCTGACCATCAGCTCCCTGCAGCCCGAGGACTTCGCCACCTACTACTGCCAGCAG
GACAACGGCTACCCCAGCACCTTTGGCGGAGGTACCAAGGTGGAAATCAAGCGTTGTGAGGCCACTCACA
AGACATCAACTTCACCCATTGTCAAGAGCTTCAACAGGAATGAGTGT]
[spacer (SEQ ID NO: 923)][PL16-0003 LC (SEQ ID NO: 961)]
(SEQ ID NO: 113)
[QGQSGS][ACHPHPYDARPYCNVGGGSSGGSGGSGGTSTSGRSANPRGGGSDIQMTQSPSSLSASVGDR
VTITCRASQSISSYLNWYQQKPGKAPKLLIYAASSLQSGVPSRFSGSGSGTDFTLTISSLQPEDFATYYC
QQDNGYPSTFGGGTKVEIKR]
PL16-0003 LC nucleotide sequence
(SEQ ID NO: 960)
GCGTGCCATCCGCATCCTTATGATGCTCGTCCTTATTGCAATGTGGGAGGTGGCTCGAGCGGTGGCAGCG
GTGGCTCTGGTGGTACTAGCACCTCTGGTCGTTCCGCTAACCCACGTGGCGGCGGTTCTGACATCCAGAT
GACCCAGAGCCCCAGCAGCCTGTCTGCTAGCGTGGGCGACAGAGTGACCATCACCTGTAGAGCCAGCCAG
AGCATCAGCAGCTACCTGAACTGGTATCAGCAGAAGCCCGGCAAGGCCCCCAAACTGCTGATCTACGCCG
CCAGCTCTCTGCAGTCTGGCGTGCCCAGCAGATTTTCCGGCAGCGGCTCTGGCACCGACTTCACCCTGAC
CATCAGCTCCCTGCAGCCCGAGGACTTCGCCACCTACTACTGCCAGCAGGACAACGGCTACCCCAGCACC
TTTGGCGGAGGTACCAAGGTGGAAATCAAGCGTTGTGAGGCCACTCACAAGACATCAACTTCACCCATTG
TCAAGAGCTTCAACAGGAATGAGTGT
PL16-0003 LC amino acid sequence
(SEQ ID NO: 961)
ACHPHPYDARPYCNVGGGSSGGSGGSGGTSTSGRSANPRGGGSDIQMTQSPSSLSASVGDRVTITCRASQ
SISSYLNWYQQKPGKAPKLLIYAASSLQSGVPSRFSGSGSGTDFTLTISSLQPEDFATYYCQQDNGYPST
FGGGTKVEIKR
[spacer (SEQ ID NO: 929)][PL17-0003 LC (SEQ ID NO: 962)]
(SEQ ID NO: 114)
[CAAGGTCAGTCTGGATCC][CCGTGCCATCCGGCTCCTTATGATGCTCGTCCTTATTGCAATGTGGGAG
GTGGCTCGAGCGGTGGCAGCGGTGGCTCTGGTGGTACTAGCACCTCTGGTCGTTCCGCTAACCCACGTGG
CGGCGGTTCTGACATCCAGATGACCCAGAGCCCCAGCAGCCTGTCTGCTAGCGTGGGCGACAGAGTGACC
ATCACCTGTAGAGCCAGCCAGAGCATCAGCAGCTACCTGAACTGGTATCAGCAGAAGCCCGGCAAGGCCC
CCAAACTGCTGATCTACGCCGCCAGCTCTCTGCAGTCTGGCGTGCCCAGCAGATTTTCCGGCAGCGGCTC
TGGCACCGACTTCACCCTGACCATCAGCTCCCTGCAGCCCGAGGACTTCGCCACCTACTACTGCCAGCAG
GACAACGGCTACCCCAGCACCTTTGGCGGAGGTACCAAGGTGGAAATCAAGCGTTGTGAGGCCACTCACA
AGACATCAACTTCACCCATTGTCAAGAGCTTCAACAGGAATGAGTGT]
[spacer (SEQ ID NO: 923)][PL17-0003 LC (SEQ ID NO: 963)]
(SEQ ID NO: 115)
[QGQSGS][PCHPAPYDARPYCNVGGGSSGGSGGSGGTSTSGRSANPRGGGSDIQMTQSPSSLSASVGDR
VTITCRASQSISSYLNWYQQKPGKAPKLLIYAASSLQSGVPSRFSGSGSGTDFTLTISSLQPEDFATYYC
QQDNGYPSTFGGGTKVEIKR]
PL17-0003 LC nucleotide sequence
(SEQ ID NO: 962)
CCGTGCCATCCGGCTCCTTATGATGCTCGTCCTTATTGCAATGTGGGAGGTGGCTCGAGCGGTGGCAGCG
GTGGCTCTGGTGGTACTAGCACCTCTGGTCGTTCCGCTAACCCACGTGGCGGCGGTTCTGACATCCAGAT
GACCCAGAGCCCCAGCAGCCTGTCTGCTAGCGTGGGCGACAGAGTGACCATCACCTGTAGAGCCAGCCAG
AGCATCAGCAGCTACCTGAACTGGTATCAGCAGAAGCCCGGCAAGGCCCCCAAACTGCTGATCTACGCCG
CCAGCTCTCTGCAGTCTGGCGTGCCCAGCAGATTTTCCGGCAGCGGCTCTGGCACCGACTTCACCCTGAC
CATCAGCTCCCTGCAGCCCGAGGACTTCGCCACCTACTACTGCCAGCAGGACAACGGCTACCCCAGCACC
TTTGGCGGAGGTACCAAGGTGGAAATCAAGCGTTGTGAGGCCACTCACAAGACATCAACTTCACCCATTG
TCAAGAGCTTCAACAGGAATGAGTGT
PL17-0003 LC amino acid sequence
(SEQ ID NO: 963)
PCHPAPYDARPYCNVGGGSSGGSGGSGGTSTSGRSANPRGGGSDIQMTQSPSSLSASVGDRVTITCRASQ
SISSYLNWYQQKPGKAPKLLIYAASSLQSGVPSRFSGSGSGTDFTLTISSLQPEDFATYYCQQDNGYPST
FGGGTKVEIKR
[spacer (SEQ ID NO: 929)][PL18-0003 LC (SEQ ID NO: 964)]
(SEQ ID NO: 116)
[CAAGGTCAGTCTGGATCC][CCGTGCCATCCGCATGCTTATGATGCTCGTCCTTATTGCAATGTGGGAG
GTGGCTCGAGCGGTGGCAGCGGTGGCTCTGGTGGTACTAGCACCTCTGGTCGTTCCGCTAACCCACGTGG
CGGCGGTTCTGACATCCAGATGACCCAGAGCCCCAGCAGCCTGTCTGCTAGCGTGGGCGACAGAGTGACC
ATCACCTGTAGAGCCAGCCAGAGCATCAGCAGCTACCTGAACTGGTATCAGCAGAAGCCCGGCAAGGCCC
CCAAACTGCTGATCTACGCCGCCAGCTCTCTGCAGTCTGGCGTGCCCAGCAGATTTTCCGGCAGCGGCTC
TGGCACCGACTTCACCCTGACCATCAGCTCCCTGCAGCCCGAGGACTTCGCCACCTACTACTGCCAGCAG
GACAACGGCTACCCCAGCACCTTTGGCGGAGGTACCAAGGTGGAAATCAAGCGTTGTGAGGCCACTCACA
AGACATCAACTTCACCCATTGTCAAGAGCTTCAACAGGAATGAGTGT]
[spacer (SEQ ID NO: 923)][PL18-0003 LC (SEQ ID NO: 965)]
(SEQ ID NO: 117)
[QGQSGS][PCHPHAYDARPYCNVGGGSSGGSGGSGGTSTSGRSANPRGGGSDIQMTQSPSSLSASVGDR
VTITCRASQSISSYLNWYOQKPGKAPKLLIYAASSLQSGVPSRFSGSGSGTDFTLTISSLQPEDFATYYC
QQDNGYPSTFGGGTKVEIKR]
PL18-0003 LC nucleotide sequence
(SEQ ID NO: 964)
CCGTGCCATCCGCATGCTTATGATGCTCGTCCTTATTGCAATGTGGGAGGTGGCTCGAGCGGTGGCAGCG
GTGGCTCTGGTGGTACTAGCACCTCTGGTCGTTCCGCTAACCCACGTGGCGGCGGTTCTGACATCCAGAT
GACCCAGAGCCCCAGCAGCCTGTCTGCTAGCGTGGGCGACAGAGTGACCATCACCTGTAGAGCCAGCCAG
AGCATCAGCAGCTACCTGAACTGGTATCAGCAGAAGCCCGGCAAGGCCCCCAAACTGCTGATCTACGCCG
CCAGCTCTCTGCAGTCTGGCGTGCCCAGCAGATTTTCCGGCAGCGGCTCTGGCACCGACTTCACCCTGAC
CATCAGCTCCCTGCAGCCCGAGGACTTCGCCACCTACTACTGCCAGCAGGACAACGGCTACCCCAGCACC
TTTGGCGGAGGTACCAAGGTGGAAATCAAGCGTTGTGAGGCCACTCACAAGACATCAACTTCACCCATTG
TCAAGAGCTTCAACAGGAATGAGTGT
PL18-0003 LC amino acid sequence
(SEQ ID NO: 965)
PCHPHAYDARPYCNVGGGSSGGSGGSGGTSTSGRSANPRGGGSDIQMTQSPSSLSASVGDRVTITCRASQ
SISSYLNWYQQKPGKAPKLLIYAASSLQSGVPSRFSGSGSGTDFTLTISSLQPEDFATYYCQQDNGYPST
FGGGTKVEIKR
[spacer (SEQ ID NO: 929)][PL19-0003 LC (SEQ ID NO: 966)]
(SEQ ID NO: 118)
[CAAGGTCAGTCTGGATCC][CCGTGCCATCCGCATCCTGCTGATGCTCGTCCTTATTGCAATGTGGGAG
GTGGCTCGAGCGGTGGCAGCGGTGGCTCTGGTGGTACTAGCACCTCTGGTCGTTCCGCTAACCCACGTGG
CGGCGGTTCTGACATCCAGATGACCCAGAGCCCCAGCAGCCTGTCTGCTAGCGTGGGCGACAGAGTGACC
ATCACCTGTAGAGCCAGCCAGAGCATCAGCAGCTACCTGAACTGGTATCAGCAGAAGCCCGGCAAGGCCC
CCAAACTGCTGATCTACGCCGCCAGCTCTCTGCAGTCTGGCGTGCCCAGCAGATTTTCCGGCAGCGGCTC
TGGCACCGACTTCACCCTGACCATCAGCTCCCTGCAGCCCGAGGACTTCGCCACCTACTACTGCCAGCAG
GACAACGGCTACCCCAGCACCTTTGGCGGAGGTACCAAGGTGGAAATCAAGCGTTGTGAGGCCACTCACA
AGACATCAACTTCACCCATTGTCAAGAGCTTCAACAGGAATGAGTGT]
[spacer (SEQ ID NO: 923)][PL19-0003 LC (SEQ ID NO: 967)]
(SEQ ID NO: 119)
[QGQSGS][PCHPHPADARPYCNVGGGSSGGSGGSGGTSTSGRSANPRGGGSDIQMTQSPSSLSASVGDR
VTITCRASQSISSYLNWYQQKPGKAPKLLIYAASSLQSGVPSRFSGSGSGTDFTLTISSLQPEDFATYYC
QQDNGYPSTFGGGTKVEIKR]
PL19-0003 LC nucleotide sequence
(SEQ ID NO: 966)
CCGTGCCATCCGCATCCTGCTGATGCTCGTCCTTATTGCAATGTGGGAGGTGGCTCGAGCGGTGGCAGCG
GTGGCTCTGGTGGTACTAGCACCTCTGGTCGTTCCGCTAACCCACGTGGCGGCGGTTCTGACATCCAGAT
GACCCAGAGCCCCAGCAGCCTGTCTGCTAGCGTGGGCGACAGAGTGACCATCACCTGTAGAGCCAGCCAG
AGCATCAGCAGCTACCTGAACTGGTATCAGCAGAAGCCCGGCAAGGCCCCCAAACTGCTGATCTACGCCG
CCAGCTCTCTGCAGTCTGGCGTGCCCAGCAGATTTTCCGGCAGCGGCTCTGGCACCGACTTCACCCTGAC
CATCAGCTCCCTGCAGCCCGAGGACTTCGCCACCTACTACTGCCAGCAGGACAACGGCTACCCCAGCACC
TTTGGCGGAGGTACCAAGGTGGAAATCAAGCGTTGTGAGGCCACTCACAAGACATCAACTTCACCCATTG
TCAAGAGCTTCAACAGGAATGAGTGT
PL19-0003 LC amino acid sequence
(SEQ ID NO: 967)
PCHPHPADARPYCNVGGGSSGGSGGSGGTSTSGRSANPRGGGSDIQMTQSPSSLSASVGDRVTITCRASQ
SISSYLNWYQQKPGKAPKLLIYAASSLQSGVPSRFSGSGSGTDFTLTISSLQPEDFATYYCQQDNGYPST
FGGGTKVEIKR
[spacer (SEQ ID NO: 929)][PL20-0003 LC (SEQ ID NO: 968)]
(SEQ ID NO: 120)
[CAAGGTCAGTCTGGATCC][CCGTGCCATCCGCATCCTTATGCTGCTCGTCCTTATTGCAATGTGGGAG
GTGGCTCGAGCGGTGGCAGCGGTGGCTCTGGTGGTACTAGCACCTCTGGTCGTTCCGCTAACCCACGTGG
CGGCGGTTCTGACATCCAGATGACCCAGAGCCCCAGCAGCCTGTCTGCTAGCGTGGGCGACAGAGTGACC
ATCACCTGTAGAGCCAGCCAGAGCATCAGCAGCTACCTGAACTGGTATCAGCAGAAGCCCGGCAAGGCCC
CCAAACTGCTGATCTACGCCGCCAGCTCTCTGCAGTCTGGCGTGCCCAGCAGATTTTCCGGCAGCGGCTC
TGGCACCGACTTCACCCTGACCATCAGCTCCCTGCAGCCCGAGGACTTCGCCACCTACTACTGCCAGCAG
GACAACGGCTACCCCAGCACCTTTGGCGGAGGTACCAAGGTGGAAATCAAGCGTTGTGAGGCCACTCACA
AGACATCAACTTCACCCATTGTCAAGAGCTTCAACAGGAATGAGTGT]
[spacer (SEQ ID NO: 923)][PL2Q-0003 LC (SEQ ID NO: 969)]
(SEQ ID NO: 121)
[QGQSGS][PCHPHPYAARPYCNVGGGSSGGSGGSGGTSTSGRSANPRGGGSDIQMTQSPSSLSASVGDR
VTITCRASQSISSYLNWYQQKPGKAPKLLIYAASSLQSGVPSRFSGSGSGTDFTLTISSLQPEDFATYYC
QQDNGYPSTFGGGTKVEIKR]
PL20-0003 LC nucleotide sequence
(SEQ ID NO: 968)
CCGTGCCATCCGCATCCTTATGCTGCTCGTCCTTATTGCAATGTGGGAGGTGGCTCGAGCGGTGGCAGCG
GTGGCTCTGGTGGTACTAGCACCTCTGGTCGTTCCGCTAACCCACGTGGCGGCGGTTCTGACATCCAGAT
GACCCAGAGCCCCAGCAGCCTGTCTGCTAGCGTGGGCGACAGAGTGACCATCACCTGTAGAGCCAGCCAG
AGCATCAGCAGCTACCTGAACTGGTATCAGCAGAAGCCCGGCAAGGCCCCCAAACTGCTGATCTACGCCG
CCAGCTCTCTGCAGTCTGGCGTGCCCAGCAGATTTTCCGGCAGCGGCTCTGGCACCGACTTCACCCTGAC
CATCAGCTCCCTGCAGCCCGAGGACTTCGCCACCTACTACTGCCAGCAGGACAACGGCTACCCCAGCACC
TTTGGCGGAGGTACCAAGGTGGAAATCAAGCGTTGTGAGGCCACTCACAAGACATCAACTTCACCCATTG
TCAAGAGCTTCAACAGGAATGAGTGT
PL20-0003 LC amino acid sequence
(SEQ ID NO: 969)
PCHPHPYAARPYCNVGGGSSGGSGGSGGTSTSGRSANPRGGGSDIQMTQSPSSLSASVGDRVTITCRASQ
SISSYLNWYQQKPGKAPKLLIYAASSLQSGVPSRFSGSGSGTDFTLTISSLQPEDFATYYCQQDNGYPST
FGGGTKVEIKR
[spacer (SEQ ID NO: 929)][PL21-0003 LC (SEQ ID NO: 970)]
(SEQ ID NO: 122)
[CAAGGTCAGTCTGGATCC][CCGTGCCATCCGCATCCTTATGATGCTGCTCCTTATTGCAATGTGGGAG
GTGGCTCGAGCGGTGGCAGCGGTGGCTCTGGTGGTACTAGCACCTCTGGTCGTTCCGCTAACCCACGTGG
CGGCGGTTCTGACATCCAGATGACCCAGAGCCCCAGCAGCCTGTCTGCTAGCGTGGGCGACAGAGTGACC
ATCACCTGTAGAGCCAGCCAGAGCATCAGCAGCTACCTGAACTGGTATCAGCAGAAGCCCGGCAAGGCCC
CCAAACTGCTGATCTACGCCGCCAGCTCTCTGCAGTCTGGCGTGCCCAGCAGATTTTCCGGCAGCGGCTC
TGGCACCGACTTCACCCTGACCATCAGCTCCCTGCAGCCCGAGGACTTCGCCACCTACTACTGCCAGCAG
GACAACGGCTACCCCAGCACCTTTGGCGGAGGTACCAAGGTGGAAATCAAGCGTTGTGAGGCCACTCACA
AGACATCAACTTCACCCATTGTCAAGAGCTTCAACAGGAATGAGTGT]
[spacer (SEQ ID NO: 923)][PL21-0003 LC (SEQ ID NO: 971)]
(SEQ ID NO: 123)
[QGQSGS][PCHPHPYDAAPYCNVGGGSSGGSGGSGGTSTSGRSANPRGGGSDIQMTQSPSSLSASVGDR
VTITCRASQSISSYLNWYQQKPGKAPKLLIYAASSLQSGVPSRFSGSGSGTDFTLTISSLQPEDFATYYC
QQDNGYPSTFGGGTKVEIKR]
PL21-0003 LC nucleotide sequence
(SEQ ID NO: 970)
CCGTGCCATCCGCATCCTTATGATGCTGCTCCTTATTGCAATGTGGGAGGTGGCTCGAGCGGTGGCAGCG
GTGGCTCTGGTGGTACTAGCACCTCTGGTCGTTCCGCTAACCCACGTGGCGGCGGTTCTGACATCCAGAT
GACCCAGAGCCCCAGCAGCCTGTCTGCTAGCGTGGGCGACAGAGTGACCATCACCTGTAGAGCCAGCCAG
AGCATCAGCAGCTACCTGAACTGGTATCAGCAGAAGCCCGGCAAGGCCCCCAAACTGCTGATCTACGCCG
CCAGCTCTCTGCAGTCTGGCGTGCCCAGCAGATTTTCCGGCAGCGGCTCTGGCACCGACTTCACCCTGAC
CATCAGCTCCCTGCAGCCCGAGGACTTCGCCACCTACTACTGCCAGCAGGACAACGGCTACCCCAGCACC
TTTGGCGGAGGTACCAAGGTGGAAATCAAGCGTTGTGAGGCCACTCACAAGACATCAACTTCACCCATTG
TCAAGAGCTTCAACAGGAATGAGTGT
PL21-0003 LC amino acid sequence
(SEQ ID NO: 971)
PCHPHPYDAAPYCNVGGGSSGGSGGSGGTSTSGRSANPRGGGSDIQMTQSPSSLSASVGDRVTITCRASQ
SISSYLNWYQQKPGKAPKLLIYAASSLQSGVPSRFSGSGSGTDFTLTISSLQPEDFATYYCQQDNGYPST
FGGGTKVEIKR
[spacer (SEQ ID NO: 929)][PL22-0003 LC (SEQ ID NO: 972)]
(SEQ ID NO: 124)
[CAAGGTCAGTCTGGATCC][CCGTGCCATCCGCATCCTTATGATGCTCGTCCTGCTTGCAATGTGGGAG
GTGGCTCGAGCGGTGGCAGCGGTGGCTCTGGTGGTACTAGCACCTCTGGTCGTTCCGCTAACCCACGTGG
CGGCGGTTCTGACATCCAGATGACCCAGAGCCCCAGCAGCCTGTCTGCTAGCGTGGGCGACAGAGTGACC
ATCACCTGTAGAGCCAGCCAGAGCATCAGCAGCTACCTGAACTGGTATCAGCAGAAGCCCGGCAAGGCCC
CCAAACTGCTGATCTACGCCGCCAGCTCTCTGCAGTCTGGCGTGCCCAGCAGATTTTCCGGCAGCGGCTC
TGGCACCGACTTCACCCTGACCATCAGCTCCCTGCAGCCCGAGGACTTCGCCACCTACTACTGCCAGCAG
GACAACGGCTACCCCAGCACCTTTGGCGGAGGTACCAAGGTGGAAATCAAGCGTTGTGAGGCCACTCACA
AGACATCAACTTCACCCATTGTCAAGAGCTTCAACAGGAATGAGTGT]
[spacer (SEQ ID NO: 923)][PL22-0003 LC (SEQ ID NO: 973)]
(SEQ ID NO: 125)
[QGQSGS][PCHPHPYDARPACNVGGGSSGGSGGSGGTSTSGRSANPRGGGSDIQMTQSPSSLSASVGDR
VTITCRASQSISSYLNWYQQKPGKAPKLLIYAASSLQSGVPSRFSGSGSGTDFTLTISSLQPEDFATYYC
QQDNGYPSTFGGGTKVEIKR]
PL22-0003 LC nucleotide sequence
(SEQ ID NO: 972)
CCGTGCCATCCGCATCCTTATGATGCTCGTCCTGCTTGCAATGTGGGAGGTGGCTCGAGCGGTGGCAGCG
GTGGCTCTGGTGGTACTAGCACCTCTGGTCGTTCCGCTAACCCACGTGGCGGCGGTTCTGACATCCAGAT
GACCCAGAGCCCCAGCAGCCTGTCTGCTAGCGTGGGCGACAGAGTGACCATCACCTGTAGAGCCAGCCAG
AGCATCAGCAGCTACCTGAACTGGTATCAGCAGAAGCCCGGCAAGGCCCCCAAACTGCTGATCTACGCCG
CCAGCTCTCTGCAGTCTGGCGTGCCCAGCAGATTTTCCGGCAGCGGCTCTGGCACCGACTTCACCCTGAC
CATCAGCTCCCTGCAGCCCGAGGACTTCGCCACCTACTACTGCCAGCAGGACAACGGCTACCCCAGCACC
TTTGGCGGAGGTACCAAGGTGGAAATCAAGCGTTGTGAGGCCACTCACAAGACATCAACTTCACCCATTG
TCAAGAGCTTCAACAGGAATGAGTGT
PL22-0003 LC amino acid sequence
(SEQ ID NO: 973)
PCHPHPYDARPACNVGGGSSGGSGGSGGTSTSGRSANPRGGGSDIQMTQSPSSLSASVGDRVTITCRASQ
SISSYLNWYOQKPGKAPKLLIYAASSLQSGVPSRFSGSGSGTDFTLTISSLQPEDFATYYCQQDNGYPST
FGGGTKVEIKR
[spacer (SEQ ID NO: 929)][PL23-0003 LC (SEQ ID NO: 974)]
(SEQ ID NO: 126)
[CAAGGTCAGTCTGGATCC][CCGTGCCATCCGCATCCTTATGATGCTCGTCCTTATTGCGCTGTGGGAG
GTGGCTCGAGCGGTGGCAGCGGTGGCTCTGGTGGTACTAGCACCTCTGGTCGTTCCGCTAACCCACGTGG
CGGCGGTTCTGACATCCAGATGACCCAGAGCCCCAGCAGCCTGTCTGCTAGCGTGGGCGACAGAGTGACC
ATCACCTGTAGAGCCAGCCAGAGCATCAGCAGCTACCTGAACTGGTATCAGCAGAAGCCCGGCAAGGCCC
CCAAACTGCTGATCTACGCCGCCAGCTCTCTGCAGTCTGGCGTGCCCAGCAGATTTTCCGGCAGCGGCTC
TGGCACCGACTTCACCCTGACCATCAGCTCCCTGCAGCCCGAGGACTTCGCCACCTACTACTGCCAGCAG
GACAACGGCTACCCCAGCACCTTTGGCGGAGGTACCAAGGTGGAAATCAAGCGTTGTGAGGCCACTCACA
AGACATCAACTTCACCCATTGTCAAGAGCTTCAACAGGAATGAGTGT]
[spacer (SEQ ID NO: 923)][PL23-0003 LC (SEQ ID NO: 975)]
(SEQ ID NO: 127)
[QGQSGS][PCHPHPYDARPYCAVGGGSSGGSGGSGGTSTSGRSANPRGGGSDIQMTQSPSSLSASVGDR
VTITCRASQSISSYLNWYQQKPGKAPKLLIYAASSLQSGVPSRFSGSGSGTDFTLTISSLQPEDFATYYC
QQDNGYPSTFGGGTKVEIKR]
PL23-0003 LC nucleotide sequence
(SEQ ID NO: 974)
CCGTGCCATCCGCATCCTTATGATGCTCGTCCTTATTGCGCTGTGGGAGGTGGCTCGAGCGGTGGCAGCG
GTGGCTCTGGTGGTACTAGCACCTCTGGTCGTTCCGCTAACCCACGTGGCGGCGGTTCTGACATCCAGAT
GACCCAGAGCCCCAGCAGCCTGTCTGCTAGCGTGGGCGACAGAGTGACCATCACCTGTAGAGCCAGCCAG
AGCATCAGCAGCTACCTGAACTGGTATCAGCAGAAGCCCGGCAAGGCCCCCAAACTGCTGATCTACGCCG
CCAGCTCTCTGCAGTCTGGCGTGCCCAGCAGATTTTCCGGCAGCGGCTCTGGCACCGACTTCACCCTGAC
CATCAGCTCCCTGCAGCCCGAGGACTTCGCCACCTACTACTGCCAGCAGGACAACGGCTACCCCAGCACC
TTTGGCGGAGGTACCAAGGTGGAAATCAAGCGTTGTGAGGCCACTCACAAGACATCAACTTCACCCATTG
TCAAGAGCTTCAACAGGAATGAGTGT
PL23-0003 LC amino acid sequence
(SEQ ID NO: 975)
PCHPHPYDARPYCAVGGGSSGGSGGSGGTSTSGRSANPRGGGSDIQMTQSPSSLSASVGDRVTITCRASQ
SISSYLNWYQQKPGKAPKLLIYAASSLQSGVPSRFSGSGSGTDFTLTISSLQPEDFATYYCQQDNGYPST
FGGGTKVEIKR
[spacer (SEQ ID NO: 929)][PL24-0003 LC (SEQ ID NO: 976)]
(SEQ ID NO: 128)
[CAAGGTCAGTCTGGATCC][CCGTGCCATGCGCATCCTTATGATGCTCGTCCTTATTGCAATGTGGGAG
GTGGCTCGAGCGGTGGCAGCGGTGGCTCTGGTGGTACTAGCACCTCTGGTCGTTCCGCTAACCCACGTGG
CGGCGGTTCTGACATCCAGATGACCCAGAGCCCCAGCAGCCTGTCTGCTAGCGTGGGCGACAGAGTGACC
ATCACCTGTAGAGCCAGCCAGAGCATCAGCAGCTACCTGAACTGGTATCAGCAGAAGCCCGGCAAGGCCC
CCAAACTGCTGATCTACGCCGCCAGCTCTCTGCAGTCTGGCGTGCCCAGCAGATTTTCCGGCAGCGGCTC
TGGCACCGACTTCACCCTGACCATCAGCTCCCTGCAGCCCGAGGACTTCGCCACCTACTACTGCCAGCAG
GACAACGGCTACCCCAGCACCTTTGGCGGAGGTACCAAGGTGGAAATCAAGCGTTGTGAGGCCACTCACA
AGACATCAACTTCACCCATTGTCAAGAGCTTCAACAGGAATGAGTGT]
[spacer (SEQ ID NO: 923)][PL24-0003 LC (SEQ ID NO: 977)]
(SEQ ID NO: 129)
[QGQSGS][PCHAHPYDARPYCNVGGGSSGGSGGSGGTSTSGRSANPRGGGSDIQMTQSPSSLSASVGDR
VTITCRASQSISSYLNWYQQKPGKAPKLLIYAASSLQSGVPSRFSGSGSGTDFTLTISSLQPEDFATYYC
QQDNGYPSTFGGGTKVEIKR]
PL24-0003 LC nucleotide sequence
(SEQ ID NO: 976)
CCGTGCCATGCGCATCCTTATGATGCTCGTCCTTATTGCAATGTGGGAGGTGGCTCGAGCGGTGGCAGCG
GTGGCTCTGGTGGTACTAGCACCTCTGGTCGTTCCGCTAACCCACGTGGCGGCGGTTCTGACATCCAGAT
GACCCAGAGCCCCAGCAGCCTGTCTGCTAGCGTGGGCGACAGAGTGACCATCACCTGTAGAGCCAGCCAG
AGCATCAGCAGCTACCTGAACTGGTATCAGCAGAAGCCCGGCAAGGCCCCCAAACTGCTGATCTACGCCG
CCAGCTCTCTGCAGTCTGGCGTGCCCAGCAGATTTTCCGGCAGCGGCTCTGGCACCGACTTCACCCTGAC
CATCAGCTCCCTGCAGCCCGAGGACTTCGCCACCTACTACTGCCAGCAGGACAACGGCTACCCCAGCACC
TTTGGCGGAGGTACCAAGGTGGAAATCAAGCGTTGTGAGGCCACTCACAAGACATCAACTTCACCCATTG
TCAAGAGCTTCAACAGGAATGAGTGT
PL24-0003 EC amino acid sequence
(SEQ ID NO: 977)
PCHAHPYDARPYCNVGGGSSGGSGGSGGTSTSGRSANPRGGGSDIQMTQSPSSLSASVGDRVTITCRASQ
SISSYLNWYQQKPGKAPKLLIYAASSLQSGVPSRFSGSGSGTDFTLTISSLQPEDFATYYCQQDNGYPST
FGGGTKVEIKR
[spacer (SEQ ID NO: 929)][PL25-0003 LC (SEQ ID NO: 978)]
(SEQ ID NO: 130)
[CAAGGTCAGTCTGGATCC][CCGTGCCATCCGCATCCTTATGATGCTCGTGCTTATTGCAATGTGGGAG
GTGGCTCGAGCGGTGGCAGCGGTGGCTCTGGTGGTACTAGCACCTCTGGTCGTTCCGCTAACCCACGTGG
CGGCGGTTCTGACATCCAGATGACCCAGAGCCCCAGCAGCCTGTCTGCTAGCGTGGGCGACAGAGTGACC
ATCACCTGTAGAGCCAGCCAGAGCATCAGCAGCTACCTGAACTGGTATCAGCAGAAGCCCGGCAAGGCCC
CCAAACTGCTGATCTACGCCGCCAGCTCTCTGCAGTCTGGCGTGCCCAGCAGATTTTCCGGCAGCGGCTC
TGGCACCGACTTCACCCTGACCATCAGCTCCCTGCAGCCCGAGGACTTCGCCACCTACTACTGCCAGCAG
GACAACGGCTACCCCAGCACCTTTGGCGGAGGTACCAAGGTGGAAATCAAGCGTTGTGAGGCCACTCACA
AGACATCAACTTCACCCATTGTCAAGAGCTTCAACAGGAATGAGTGT]
[spacer (SEQ ID NO: 923)][PL25-0003 LC (SEQ ID NO: 979)]
(SEQ ID NO: 131)
[QGQSGS][PCHPHPYDARAYCNVGGGSSGGSGGSGGTSTSGRSANPRGGGSDIQMTQSPSSLSASVGDR
VTITCRASQSISSYLNWYQQKPGKAPKLLIYAASSLQSGVPSRFSGSGSGTDFTLTISSLQPEDFATYYC
QQDNGYPSTFGGGTKVEIKR]
PL25-0003 LC nucleotide sequence
(SEQ ID NO: 978)
CCGTGCCATCCGCATCCTTATGATGCTCGTGCTTATTGCAATGTGGGAGGTGGCTCGAGCGGTGGCAGCG
GTGGCTCTGGTGGTACTAGCACCTCTGGTCGTTCCGCTAACCCACGTGGCGGCGGTTCTGACATCCAGAT
GACCCAGAGCCCCAGCAGCCTGTCTGCTAGCGTGGGCGACAGAGTGACCATCACCTGTAGAGCCAGCCAG
AGCATCAGCAGCTACCTGAACTGGTATCAGCAGAAGCCCGGCAAGGCCCCCAAACTGCTGATCTACGCCG
CCAGCTCTCTGCAGTCTGGCGTGCCCAGCAGATTTTCCGGCAGCGGCTCTGGCACCGACTTCACCCTGAC
CATCAGCTCCCTGCAGCCCGAGGACTTCGCCACCTACTACTGCCAGCAGGACAACGGCTACCCCAGCACC
TTTGGCGGAGGTACCAAGGTGGAAATCAAGCGTTGTGAGGCCACTCACAAGACATCAACTTCACCCATTG
TCAAGAGCTTCAACAGGAATGAGTGT
PL25-0 003 LC amino acid sequence
(SEQ ID NO: 979)
PCHPHPYDARAYCNVGGGSSGGSGGSGGTSTSGRSANPRGGGSDIQMTQSPSSLSASVGDRVTITCRASQ
SISSYLNWYQQKPGKAPKLLIYAASSLQSGVPSRFSGSGSGTDFTLTISSLQPEDFATYYCQQDNGYPST
FGGGTKVEIKR
[spacer (SEQ ID NO: 929)][PL03-2001 LC (SEQ ID NO: 980)]
(SEQ ID NO: 132)
[CAAGGTCAGTCTGGATCC][GGAGGTGGCTCGAGCGGTGGCAGCGGTGGCTCTGGTGGTATTAGCAGTG
GTCTGTTAAGCGGTCGTAGCGATAATCATGGCGGTTCTGACATCCAGATGACCCAGAGCCCCAGCAGCCT
GTCTGCTAGCGTGGGCGACAGAGTGACCATCACCTGTAGAGCCAGCCAGAGCATCAGCAGCTACCTGAAC
TGGTATCAGCAGAAGCCCGGCAAGGCCCCCAAACTGCTGATCTACGCCGCCAGCTCTCTGCAGTCTGGCG
TGCCCAGCAGATTTTCCGGCAGCGGCTCTGGCACCGACTTCACCCTGACCATCAGCTCCCTGCAGCCCGA
GGACTTCGCCACCTACTACTGCCAGCAGGACAACGGCTACCCCAGCACCTTTGGCGGAGGTACCAAGGTG
GAAATCAAGCGTTGTGAGGCCACTCACAAGACATCAACTTCACCCATTGTCAAGAGCTTCAACAGGAATG
AGTGT]
[spacer (SEQ ID NO: 923)][PL03-2001 LC (SEQ ID NO: 981)]
(SEQ ID NO: 133)
[QGQSGS][LCEVLMLLQHPWCMGGGGSSGGSGGSGGISSGLLSGRSDNHGGSDIQMTQSPSSLSASVGD
RVTITCRASQSISSYLNWYQQKPGKAPKLLIYAASSLQSGVPSRFSGSGSGTDFTLTISSLQPEDFATYY
CQODNGYPSTFGGGTKVEIKR]
PL03-2001 LC nucleotide sequence
(SEQ ID NO: 980)
GGAGGTGGCTCGAGCGGTGGCAGCGGTGGCTCTGGTGGTATTAGCAGTGGTCTGTTAAGCGGTCGTAGCG
ATAATCATGGCGGTTCTGACATCCAGATGACCCAGAGCCCCAGCAGCCTGTCTGCTAGCGTGGGCGACAG
AGTGACCATCACCTGTAGAGCCAGCCAGAGCATCAGCAGCTACCTGAACTGGTATCAGCAGAAGCCCGGC
AAGGCCCCCAAACTGCTGATCTACGCCGCCAGCTCTCTGCAGTCTGGCGTGCCCAGCAGATTTTCCGGCA
GCGGCTCTGGCACCGACTTCACCCTGACCATCAGCTCCCTGCAGCCCGAGGACTTCGCCACCTACTACTG
CCAGCAGGACAACGGCTACCCCAGCACCTTTGGCGGAGGTACCAAGGTGGAAATCAAGCGTTGTGAGGCC
ACTCACAAGACATCAACTTCACCCATTGTCAAGAGCTTCAACAGGAATGAGTGT
PL03-2001 LC amino acid sequence
(SEQ ID NO: 981)
LCEVLMLLQHPWCMGGGGSSGGSGGSGGISSGLLSGRSDNHGGSDIQMTQSPSSLSASVGDRVTITCRAS
QSISSYLNWYQQKPGKAPKLLIYAASSLQSGVPSRFSGSGSGTDFTLTISSLQPEDFATYYCQQDNGYPS
TFGGGTKVEIKR
[spacer (SEQ ID NO: 923)][PL04-2001 LC (SEQ ID NO: 1183)]
(SEQ ID NO: 1182)
[QGQSGS][IACRHFMEQLPFCHHGGGSSGGSGGSGGISSGLLSGRSDNHGGSDIQMTQSPSSLSASVGD
RVTITCRASQSISSYLNWYQQKPGKAPKLLIYAASSLQSGVPSRFSGSGSGTDFTLTISSLQPEDFATYY
CQQDNGYPSTFGGGTKVEIKR]
PL04-2001 LC amino acid sequence
(SEQ ID NO: 1183)
IACRHFMEQLPFCHHGGGSSGGSGGSGGISSGLLSGRSDNHGGSDIQMTQSPSSLSASVGDRVTITCRAS
QSISSYLNWYQQKPGKAPKLLIYAASSLQSGVPSRFSGSGSGTDFTLTISSLQPEDFATYYCQQDNGYPS
TFGGGTKVEIKR
[spacer (SEQ ID NO: 929)][PL06-2001-mk LC (SEQ ID NO: 982)]
(SEQ ID NO: 134)
[CAAGGTCAGTCTGGATCC][GGAGGTGGCTCGAGCGGTGGCAGCGGTGGCTCTGGTGGTATTAGCAGTG
GTCTGTTAAGCGGTCGTAGCGATAATCATGGCGGTTCTGACATCCAGATGACCCAGAGCCCCAGCAGCCT
GTCTGCTAGCGTGGGCGACAGAGTGACCATCACCTGTAGAGCCAGCCAGAGCATCAGCAGCTACCTGAAC
TGGTATCAGCAGAAGCCCGGCAAGGCCCCCAAACTGCTGATCTACGCCGCCAGCTCTCTGCAGTCTGGCG
TGCCCAGCAGATTTTCCGGCAGCGGCTCTGGCACCGACTTCACCCTGACCATCAGCTCCCTGCAGCCCGA
GGACTTCGCCACCTACTACTGCCAGCAGGACAACGGCTACCCCAGCACCTTTGGCGGAGGTACCAAGGTG
GAAATCAAGCGTTGTGAGGCCACTCACAAGACATCAACTTCACCCATTGTCAAGAGCTTCAACAGGAATG
AGTGT]
[spacer (SEQ ID NO: 923)][PL06-2001-mk LC (SEQ ID NO: 983)]
(SEQ ID NO: 135)
[QGQSGS][ILYCDSWGAGCLTRPGGGSSGGSGGSGGISSGLLSGRSDNHGGSDIQMTOSPSSLSASVGD
RVTITCRASQSISSYLNWYQQKPGKAPKLLIYAASSLQSGVPSRFSGSGSGTDFTLTISSLQPEDFATYY
CQQDNGYPSTFGGGTKVEIKR]
PL06-2001-mk LC nucleotide sequence
(SEQ ID NO: 982)
GGAGGTGGCTCGAGCGGTGGCAGCGGTGGCTCTGGTGGTATTAGCAGTGGTCTGTTAAGCGGTCGTAGCG
ATAATCATGGCGGTTCTGACATCCAGATGACCCAGAGCCCCAGCAGCCTGTCTGCTAGCGTGGGCGACAG
AGTGACCATCACCTGTAGAGCCAGCCAGAGCATCAGCAGCTACCTGAACTGGTATCAGCAGAAGCCCGGC
AAGGCCCCCAAACTGCTGATCTACGCCGCCAGCTCTCTGCAGTCTGGCGTGCCCAGCAGATTTTCCGGCA
GCGGCTCTGGCACCGACTTCACCCTGACCATCAGCTCCCTGCAGCCCGAGGACTTCGCCACCTACTACTG
CCAGCAGGACAACGGCTACCCCAGCACCTTTGGCGGAGGTACCAAGGTGGAAATCAAGCGTTGTGAGGCC
ACTCACAAGACATCAACTTCACCCATTGTCAAGAGCTTCAACAGGAATGAGTGT
PL06-2001-mk LC amino acid sequence
(SEQ ID NO: 983)
ILYCDSWGAGCLTRPGGGSSGGSGGSGGISSGLLSGRSDNHGGSDIQMTQSPSSLSASVGDRVTITCRAS
QSISSYLNWYQQKPGKAPKLLIYAASSLQSGVPSRFSGSGSGTDFTLTISSLQPEDFATYYCQQDNGYPS
TFGGGTKVEIKR
[spacer (SEQ ID NO: 929)][PL07-2001 LC (SEQ ID NO: 984)]
(SEQ ID NO: 136)
[CAAGGTCAGTCTGGATCC][GGAGGTGGCTCGAGCGGTGGCAGCGGTGGCTCTGGTGGTATTAGCAGTG
GTCTGTTAAGCGGTCGTAGCGATAATCATGGCGGTTCTGACATCCAGATGACCCAGAGCCCCAGCAGCCT
GTCTGCTAGCGTGGGCGACAGAGTGACCATCACCTGTAGAGCCAGCCAGAGCATCAGCAGCTACCTGAAC
TGGTATCAGCAGAAGCCCGGCAAGGCCCCCAAACTGCTGATCTACGCCGCCAGCTCTCTGCAGTCTGGCG
TGCCCAGCAGATTTTCCGGCAGCGGCTCTGGCACCGACTTCACCCTGACCATCAGCTCCCTGCAGCCCGA
GGACTTCGCCACCTACTACTGCCAGCAGGACAACGGCTACCCCAGCACCTTTGGCGGAGGTACCAAGGTG
GAAATCAAGCGTTGTGAGGCCACTCACAAGACATCAACTTCACCCATTGTCAAGAGCTTCAACAGGAATG
AGTGT]
[spacer (SEQ ID NO: 923)][PL07-2001 LC (SEQ ID NO: 985)]
(SEQ ID NO: 137)
[QGQSGS][GIALCPSHFCQLPQTGGGSSGGSGGSGGISSGLLSGRSDNHGGSDIQMTQSPSSLSASVGD
RVTITCRASQSISSYLNWYQQKPGKAPKLLIYAASSLQSGVPSRFSGSGSGTDFTLTISSLQPEDFATYY
CQQDNGYPSTFGGGTKVEIKR]
PL07-2001 LC nucleotide sequence
(SEQ ID NO: 984)
GGAGGTGGCTCGAGCGGTGGCAGCGGTGGCTCTGGTGGTATTAGCAGTGGTCTGTTAAGCGGTCGTAGCG
ATAATCATGGCGGTTCTGACATCCAGATGACCCAGAGCCCCAGCAGCCTGTCTGCTAGCGTGGGCGACAG
AGTGACCATCACCTGTAGAGCCAGCCAGAGCATCAGCAGCTACCTGAACTGGTATCAGCAGAAGCCCGGC
AAGGCCCCCAAACTGCTGATCTACGCCGCCAGCTCTCTGCAGTCTGGCGTGCCCAGCAGATTTTCCGGCA
GCGGCTCTGGCACCGACTTCACCCTGACCATCAGCTCCCTGCAGCCCGAGGACTTCGCCACCTACTACTG
CCAGCAGGACAACGGCTACCCCAGCACCTTTGGCGGAGGTACCAAGGTGGAAATCAAGCGTTGTGAGGCC
ACTCACAAGACATCAACTTCACCCATTGTCAAGAGCTTCAACAGGAATGAGTGT
PL07-2001 LC amino acid sequence
(SEQ ID NO: 985)
GIALCPSHFCQLPQTGGGSSGGSGGSGGISSGLLSGRSDNHGGSDIQMTQSPSSLSASVGDRVTITCRAS
QSISSYLNWYQQKPGKAPKLLIYAASSLQSGVPSRFSGSGSGTDFTLTISSLQPEDFATYYCQQDNGYPS
TFGGGTKVEIKR
[spacer (SEQ ID NO: 929)][PL10-2001 LC (SEQ ID NO: 986)]
(SEQ ID NO: 138)
[CAAGGTCAGTCTGGATCC][GGAGGTGGCTCGAGCGGTGGCAGCGGTGGCTCTGGTGGTATTAGCAGTG
GTCTGTTAAGCGGTCGTAGCGATAATCATGGCGGTTCTGACATCCAGATGACCCAGAGCCCCAGCAGCCT
GTCTGCTAGCGTGGGCGACAGAGTGACCATCACCTGTAGAGCCAGCCAGAGCATCAGCAGCTACCTGAAC
TGGTATCAGCAGAAGCCCGGCAAGGCCCCCAAACTGCTGATCTACGCCGCCAGCTCTCTGCAGTCTGGCG
TGCCCAGCAGATTTTCCGGCAGCGGCTCTGGCACCGACTTCACCCTGACCATCAGCTCCCTGCAGCCCGA
GGACTTCGCCACCTACTACTGCCAGCAGGACAACGGCTACCCCAGCACCTTTGGCGGAGGTACCAAGGTG
GAAATCAAGCGTTGTGAGGCCACTCACAAGACATCAACTTCACCCATTGTCAAGAGCTTCAACAGGAATG
AGTGT]
[spacer (SEQ ID NO: 923)][PL10-2001 LC (SEQ ID NO: 987)]
(SEQ ID NO: 139)
[QGQSGS][PCHPHPYDARPYCNVGGGSSGGSGGSGGISSGLLSGRSDNHGGSDIQMTQSPSSLSASVGD
RVTITCRASQSISSYLNWYQQKPGKAPKLLIYAASSLQSGVPSRFSGSGSGTDFTLTISSLQPEDFATYY
CQQDNGYPSTFGGGTKVEIKR]
PL10-2001 LC nucleotide sequence
(SEQ ID NO: 986)
GGAGGTGGCTCGAGCGGTGGCAGCGGTGGCTCTGGTGGTATTAGCAGTGGTCTGTTAAGCGGTCGTAGCG
ATAATCATGGCGGTTCTGACATCCAGATGACCCAGAGCCCCAGCAGCCTGTCTGCTAGCGTGGGCGACAG
AGTGACCATCACCTGTAGAGCCAGCCAGAGCATCAGCAGCTACCTGAACTGGTATCAGCAGAAGCCCGGC
AAGGCCCCCAAACTGCTGATCTACGCCGCCAGCTCTCTGCAGTCTGGCGTGCCCAGCAGATTTTCCGGCA
GCGGCTCTGGCACCGACTTCACCCTGACCATCAGCTCCCTGCAGCCCGAGGACTTCGCCACCTACTACTG
CCAGCAGGACAACGGCTACCCCAGCACCTTTGGCGGAGGTACCAAGGTGGAAATCAAGCGTTGTGAGGCC
ACTCACAAGACATCAACTTCACCCATTGTCAAGAGCTTCAACAGGAATGAGTGT
PL10-2001 LC amino acid sequence
(SEQ ID NO: 987)
PCHPHPYDARPYCNVGGGSSGGSGGSGGISSGLLSGRSDNHGGSDIQMTQSPSSLSASVGDRVTITCRAS
QSISSYLNWYQQKPGKAPKLLIYAASSLQSGVPSRFSGSGSGTDFTLTISSLQPEDFATYYCQQDNGYPS
TFGGGTKVEIKR
[spacer (SEQ ID NO: 923)][PL11-2001 LC (SEQ ID NO: 1185)]
(SEQ ID NO: 1184)
[QGQSGS][PCYWHPFFAYRYCNTGGGSSGGSGGSGGISSGLLSGRSDNHGGSDIQMTQSPSSLSASVGD
RVTITCRASQSISSYLNWYQQKPGKAPKLLIYAASSLQSGVPSRFSGSGSGTDFTLTISSLQPEDFATYY
CQQDNGYPSTFGGGTKVEIKR]
PL11-2001 LC amino acid sequence
(SEQ ID NO: 1185)
PCYWHPFFAYRYCNTGGGSSGGSGGSGGISSGLLSGRSDNHGGSDIQMTQSPSSLSASVGDRVTITCRAS
QSISSYLNWYQQKPGKAPKLLIYAASSLQSGVPSRFSGSGSGTDFTLTISSLQPEDFATYYCQQDNGYPS
TFGGGTKVEIKR
[spacer (SEQ ID NO: 923)][PL12-2001 LC (SEQ ID NO: 1187)]
(SEQ ID NO: 1186)
[QGQSGS][VCYYMDWLGRNWCSSGGGSSGGSGGSGGISSGLLSGRSDNHGGSDIQMTQSPSSLSASVGD
RVTITCRASQSISSYLNWYQQKPGKAPKLLIYAASSLQSGVPSRFSGSGSGTDFTLTISSLQPEDFATYY
CQQDNGYPSTFGGGTKVEIKR]
PL12-2001 LC amino acid sequence
(SEQ ID NO: 1187)
VCYYMDWLGRNWCSSGGGSSGGSGGSGGISSGLLSGRSDNHGGSDIQMTOSPSSLSASVGDRVTITCRAS
QSISSYLNWYQQKPGKAPKLLIYAASSLQSGVPSRFSGSGSGTDFTLTISSLQPEDFATYYCQQDNGYPS
TFGGGTKVEIKR
[spacer (SEQ ID NO: 929)][PL14-2001 LC (SEQ ID NO: 988)]
(SEQ ID NO: 140)
[CAAGGTCAGTCTGGATCC][GGAGGTGGCTCGAGCGGTGGCAGCGGTGGCTCTGGTGGTATTAGCAGTG
GTCTGTTAAGCGGTCGTAGCGATAATCATGGCGGTTCTGACATCCAGATGACCCAGAGCCCCAGCAGCCT
GTCTGCTAGCGTGGGCGACAGAGTGACCATCACCTGTAGAGCCAGCCAGAGCATCAGCAGCTACCTGAAC
TGGTATCAGCAGAAGCCCGGCAAGGCCCCCAAACTGCTGATCTACGCCGCCAGCTCTCTGCAGTCTGGCG
TGCCCAGCAGATTTTCCGGCAGCGGCTCTGGCACCGACTTCACCCTGACCATCAGCTCCCTGCAGCCCGA
GGACTTCGCCACCTACTACTGCCAGCAGGACAACGGCTACCCCAGCACCTTTGGCGGAGGTACCAAGGTG
GAAATCAAGCGTTGTGAGGCCACTCACAAGACATCAACTTCACCCATTGTCAAGAGCTTCAACAGGAATG
AGTGT]
[spacer (SEQ ID NO: 923)][PL14-2001 LC (SEQ ID NO: 989)]
(SEQ ID NO: 141)
[QGQSGS][YLPCHFVPIGACNNKGGGSSGGSGGSGGISSGLLSGRSDNHGGSDIQMTQSPSSLSASVGD
RVTITCRASQSISSYLNWYQQKPGKAPKLLIYAASSLQSGVPSRFSGSGSGTDFTLTISSLQPEDFATYY
CQQDNGYPSTFGGGTKVEIKR]
PL14-2001 LC nucleotide sequence
(SEQ ID NO: 988)
GGAGGTGGCTCGAGCGGTGGCAGCGGTGGCTCTGGTGGTATTAGCAGTGGTCTGTTAAGCGGTCGTAGCG
ATAATCATGGCGGTTCTGACATCCAGATGACCCAGAGCCCCAGCAGCCTGTCTGCTAGCGTGGGCGACAG
AGTGACCATCACCTGTAGAGCCAGCCAGAGCATCAGCAGCTACCTGAACTGGTATCAGCAGAAGCCCGGC
AAGGCCCCCAAACTGCTGATCTACGCCGCCAGCTCTCTGCAGTCTGGCGTGCCCAGCAGATTTTCCGGCA
GCGGCTCTGGCACCGACTTCACCCTGACCATCAGCTCCCTGCAGCCCGAGGACTTCGCCACCTACTACTG
CCAGCAGGACAACGGCTACCCCAGCACCTTTGGCGGAGGTACCAAGGTGGAAATCAAGCGTTGTGAGGCC
ACTCACAAGACATCAACTTCACCCATTGTCAAGAGCTTCAACAGGAATGAGTGT
PL14-2001 LC amino acid sequence
(SEQ ID NO: 989)
YLPCHFVPIGACNNKGGGSSGGSGGSGGISSGLLSGRSDNHGGSDIQMTQSPSSLSASVGDRVTITCRAS
QSISSYLNWYQQKPGKAPKLLIYAASSLQSGVPSRFSGSGSGTDFTLTISSLQPEDFATYYCQQDNGYPS
TFGGGTKVEIKR
[spacer (SEQ ID NO: 929)][PL15-2001 LC (SEQ ID NO: 990)]
(SEQ ID NO: 142)
[CAAGGTCAGTCTGGATCC][GGAGGTGGCTCGAGCGGTGGCAGCGGTGGCTCTGGTGGTATTAGCAGTG
GTCTGTTAAGCGGTCGTAGCGATAATCATGGCGGTTCTGACATCCAGATGACCCAGAGCCCCAGCAGCCT
GTCTGCTAGCGTGGGCGACAGAGTGACCATCACCTGTAGAGCCAGCCAGAGCATCAGCAGCTACCTGAAC
TGGTATCAGCAGAAGCCCGGCAAGGCCCCCAAACTGCTGATCTACGCCGCCAGCTCTCTGCAGTCTGGCG
TGCCCAGCAGATTTTCCGGCAGCGGCTCTGGCACCGACTTCACCCTGACCATCAGCTCCCTGCAGCCCGA
GGACTTCGCCACCTACTACTGCCAGCAGGACAACGGCTACCCCAGCACCTTTGGCGGAGGTACCAAGGTG
GAAATCAAGCGTTGTGAGGCCACTCACAAGACATCAACTTCACCCATTGTCAAGAGCTTCAACAGGAATG
AGTGT]
[spacer (SEQ ID NO: 923)][pL15-2001 LC (SEQ ID NO: 991)]
(SEQ ID NO: 143)
[QGQSGS][IFCHMGVVVPQCANYGGGSSGGSGGSGGISSGLLSGRSDNHGGSDIQMTQSPSSLSASVGD
RVTITCRASQSISSYLNWYQQKPGKAPKLLIYAASSLQSGVPSRFSGSGSGTDFTLTISSLQPEDFATYY
CQQDNGYPSTFGGGTKVEIKR]
PL15-2001 LC nucleotide sequence
(SEQ ID NO: 990)
GGAGGTGGCTCGAGCGGTGGCAGCGGTGGCTCTGGTGGTATTAGCAGTGGTCTGTTAAGCGGTCGTAGCG
ATAATCATGGCGGTTCTGACATCCAGATGACCCAGAGCCCCAGCAGCCTGTCTGCTAGCGTGGGCGACAG
AGTGACCATCACCTGTAGAGCCAGCCAGAGCATCAGCAGCTACCTGAACTGGTATCAGCAGAAGCCCGGC
AAGGCCCCCAAACTGCTGATCTACGCCGCCAGCTCTCTGCAGTCTGGCGTGCCCAGCAGATTTTCCGGCA
GCGGCTCTGGCACCGACTTCACCCTGACCATCAGCTCCCTGCAGCCCGAGGACTTCGCCACCTACTACTG
CCAGCAGGACAACGGCTACCCCAGCACCTTTGGCGGAGGTACCAAGGTGGAAATCAAGCGTTGTGAGGCC
ACTCACAAGACATCAACTTCACCCATTGTCAAGAGCTTCAACAGGAATGAGTGT
PL15-2001 LC amino acid sequence
(SEQ ID NO: 991)
IFCHMGVVVPQCANYGGGSSGGSGGSGGISSGLLSGRSDNHGGSDIQMTQSPSSLSASVGDRVTITCRAS
QSISSYLNWYQOKPGKAPKLLIYAASSLQSGVPSRFSGSGSGTDFTLTISSLQPEDFATYYCQQDNGYPS
TFGGGTKVEIKR
[spacer (SEQ ID NO: 929)][PL18-2001 LC (SEQ ID NO: 992)]
(SEQ ID NO: 144)
[CAAGGTCAGTCTGGATCC][GGAGGTGGCTCGAGCGGTGGCAGCGGTGGCTCTGGTGGTATTAGCAGTG
GTCTGTTAAGCGGTCGTAGCGATAATCATGGCGGTTCTGACATCCAGATGACCCAGAGCCCCAGCAGCCT
GTCTGCTAGCGTGGGCGACAGAGTGACCATCACCTGTAGAGCCAGCCAGAGCATCAGCAGCTACCTGAAC
TGGTATCAGCAGAAGCCCGGCAAGGCCCCCAAACTGCTGATCTACGCCGCCAGCTCTCTGCAGTCTGGCG
TGCCCAGCAGATTTTCCGGCAGCGGCTCTGGCACCGACTTCACCCTGACCATCAGCTCCCTGCAGCCCGA
GGACTTCGCCACCTACTACTGCCAGCAGGACAACGGCTACCCCAGCACCTTTGGCGGAGGTACCAAGGTG
GAAATCAAGCGTTGTGAGGCCACTCACAAGACATCAACTTCACCCATTGTCAAGAGCTTCAACAGGAATG
AGTGT]
[spacer (SEQ ID NO: 923)][PL18-2001 LC (SEQ ID NO: 993)]
(SEQ ID NO: 145)
[QGQSGS][PCHPHAYDARPYCNVGGGSSGGSGGSGGISSGLLSGRSDNHGGSDIQMTQSPSSLSASVGD
RVTITCRASQSISSYLNWYQOKPGKAPKLLIYAASSLQSGVPSRFSGSGSGTDFTLTISSLQPEDFATYY
CQQDNGYPSTFGGGTKVEIKR]
PL18-2001 LC nucleotide sequence
(SEQ ID NO: 992)
GGAGGTGGCTCGAGCGGTGGCAGCGGTGGCTCTGGTGGTATTAGCAGTGGTCTGTTAAGCGGTCGTAGCG
ATAATCATGGCGGTTCTGACATCCAGATGACCCAGAGCCCCAGCAGCCTGTCTGCTAGCGTGGGCGACAG
AGTGACCATCACCTGTAGAGCCAGCCAGAGCATCAGCAGCTACCTGAACTGGTATCAGCAGAAGCCCGGC
AAGGCCCCCAAACTGCTGATCTACGCCGCCAGCTCTCTGCAGTCTGGCGTGCCCAGCAGATTTTCCGGCA
GCGGCTCTGGCACCGACTTCACCCTGACCATCAGCTCCCTGCAGCCCGAGGACTTCGCCACCTACTACTG
CCAGCAGGACAACGGCTACCCCAGCACCTTTGGCGGAGGTACCAAGGTGGAAATCAAGCGTTGTGAGGCC
ACTCACAAGACATCAACTTCACCCATTGTCAAGAGCTTCAACAGGAATGAGTGT
PL18-2001 LC amino acid sequence
(SEQ ID NO: 993)
PCHPHAYDARPYCNVGGGSSGGSGGSGGISSGLLSGRSDNHGGSDIQMTQSPSSLSASVGDRVTITCRAS
QSISSYLNWYQQKPGKAPKLLIYAASSLQSGVPSRFSGSGSGTDFTLTISSLQPEDFATYYCQQDNGYPS
TFGGGTKVEIKR
[spacer (SEQ ID NO: 923)][PL19-2001 LC (SEQ ID NO: 1189)]
(SEQ ID NO: 1188)
[QGQSGS][PCHPHPADARPYCNVGGGSSGGSGGSGGISSGLLSGRSDNHGGSDIQMTQSPSSLSASVGD
RVTITCRASQSISSYLNWYQQKPGKAPKLLIYAASSLQSGVPSRFSGSGSGTDFTLTISSLQPEDFATYY
CQQDNGYPSTFGGGTKVEIKR]
PL19-2001 LC amino acid sequence
(SEQ ID NO: 1189)
PCHPHPADARPYCNVGGGSSGGSGGSGGISSGLLSGRSDNHGGSDIQMTQSPSSLSASVGDRVTITCRAS
QSISSYLNWYQQKPGKAPKLLIYAASSLQSGVPSRFSGSGSGTDFTLTISSLQPEDFATYYCQQDNGYPS
TFGGGTKVEIKR
[spacer (SEQ ID NO: 923)][PL20-2001 LC (SEQ ID NO: 1191)]
(SEQ ID NO: 1190)
[QGQSGS][PCHPHPYAARPYCNVGGGSSGGSGGSGGISSGLLSGRSDNHGGSDIQMTQSPSSLSASVGD
RVTITCRASQSISSYLNWYQQKPGKAPKLLIYAASSLQSGVPSRFSGSGSGTDFTLTISSLQPEDFATYY
CQQDNGYPSTFGGGTKVEIKR]
PL20-2001 LC amino acid sequence
(SEQ ID NO: 1191)
PCHPHPYAARPYCNVGGGSSGGSGGSGGISSGLLSGRSDNHGGSDIQMTQSPSSLSASVGDRVTITCRAS
QSISSYLNWYQQKPGKAPKLLIYAASSLQSGVPSRFSGSGSGTDFTLTISSLQPEDFATYYCQQDNGYPS
TFGGGTKVEIKR
[spacer (SEQ ID NO: 929)][PL03-1004/GG/0001 (also referred to herein
as PL03-3001) LC (SEQ ID NO: 994)]
(SEQ ID NO: 146)
[CAAGGTCAGTCTGGATCC][GGAGGTGGCTCGAGCGGTGGCAGCGGTGCTGTGGGTCTCCTGGCTCCCC
CGGGCGGCCTGTCCGGCCGCAGCGATAATCATGGCGGTTCTGACATCCAGATGACCCAGAGCCCCAGCAG
CCTGTCTGCTAGCGTGGGCGACAGAGTGACCATCACCTGTAGAGCCAGCCAGAGCATCAGCAGCTACCTG
AACTGGTATCAGCAGAAGCCCGGCAAGGCCCCCAAACTGCTGATCTACGCCGCCAGCTCTCTGCAGTCTG
GCGTGCCCAGCAGATTTTCCGGCAGCGGCTCTGGCACCGACTTCACCCTGACCATCAGCTCCCTGCAGCC
CGAGGACTTCGCCACCTACTACTGCCAGCAGGACAACGGCTACCCCAGCACCTTTGGCGGAGGTACCAAG
GTGGAAATCAAGCGTTGTGAGGCCACTCACAAGACATCAACTTCACCCATTGTCAAGAGCTTCAACAGGA
ATGAGTGT]
[spacer (SEQ ID NO: 923)][PL03-1004/GG/0001 LC (SEQ ID NO: 995)]
(SEQ ID NO: 147)
[QGQSGS][LCEVLMLLQHPWCMGGGGSSGGSGAVGLLAPPGGLSGRSDNHGGSDIQMTQSPSSLSASVG
DRVTITCRASQSISSYLNWYQQKPGKAPKLLIYAASSLQSGVPSRFSGSGSGTDFTLTISSLQPEDFATY
YCQQDNGYPSTFGGGTKVEIKR]
PL03-1004/GG/0001 LC nucleotide sequence
(SEQ ID NO: 994)
GGAGGTGGCTCGAGCGGTGGCAGCGGTGCTGTGGGTCTCCTGGCTCCCCCGGGCGGCCTGTCCGGCCGCA
GCGATAATCATGGCGGTTCTGACATCCAGATGACCCAGAGCCCCAGCAGCCTGTCTGCTAGCGTGGGCGA
CAGAGTGACCATCACCTGTAGAGCCAGCCAGAGCATCAGCAGCTACCTGAACTGGTATCAGCAGAAGCCC
GGCAAGGCCCCCAAACTGCTGATCTACGCCGCCAGCTCTCTGCAGTCTGGCGTGCCCAGCAGATTTTCCG
GCAGCGGCTCTGGCACCGACTTCACCCTGACCATCAGCTCCCTGCAGCCCGAGGACTTCGCCACCTACTA
CTGCCAGCAGGACAACGGCTACCCCAGCACCTTTGGCGGAGGTACCAAGGTGGAAATCAAGCGTTGTGAG
GCCACTCACAAGACATCAACTTCACCCATTGTCAAGAGCTTCAACAGGAATGAGTGT
PL03-1004/GG/0001 LC amino acid sequence
(SEQ ID NO: 995)
LCEVLMLLQHPWCMGGGGSSGGSGAVGLLAPPGGLSGRSDNHGGSDIQMTQSPSSLSASVGDRVTITCRA
SQSISSYLNWYQQKPGKAPKLLIYAASSLQSGVPSRFSGSGSGTDFTLTISSLQPEDFATYYCQQDNGYP
STFGGGTKVEIKR
[spacer (SEQ ID NO: 929) ][PL06-1004/GG/0001 (also referred to herein
as PL06-3001) LC (SEQ ID NO: 996)]
(SEQ ID NO: 148)
[CAAGGTCAGTCTGGATCC][GGAGGTGGCTCGAGCGGTGGCAGCGGTGCTGTGGGTCTCCTGGCTCCCC
CGGGCGGCCTGTCCGGCCGCAGCGATAATCATGGCGGTTCTGACATCCAGATGACCCAGAGCCCCAGCAG
CCTGTCTGCTAGCGTGGGCGACAGAGTGACCATCACCTGTAGAGCCAGCCAGAGCATCAGCAGCTACCTG
AACTGGTATCAGCAGAAGCCCGGCAAGGCCCCCAAACTGCTGATCTACGCCGCCAGCTCTCTGCAGTCTG
GCGTGCCCAGCAGATTTTCCGGCAGCGGCTCTGGCACCGACTTCACCCTGACCATCAGCTCCCTGCAGCC
CGAGGACTTCGCCACCTACTACTGCCAGCAGGACAACGGCTACCCCAGCACCTTTGGCGGAGGTACCAAG
GTGGAAATCAAGCGTTGCGAAGTCACCCATCAGGGCCTGAGCTCGCCCGTCACAAAGAGCTTCAACAGGG
GAGAGTGT]
[spacer (SEQ ID NO: 923)][PL06-1004/GG/0001 LC (SEQ ID NO: 997)]
(SEQ ID NO: 149)
[QGQSGS][ILYCDSWGAGCLTRPGGGSSGGSGAVGLLAPPGGLSGRSDNHGGSDIQMTQSPSSLSASVG
DRVTITCRASQSISSYLNWYQQKPGKAPKLLYAASSLQSGVPSRFSGSGSGTDFTLTISSLQPEDFATY
YCQQDNGYPSTFGGGTKVEIKR]
PL06-1004/GG/0001 LC nucleotide sequence
(SEQ ID NO: 996)
GGAGGTGGCTCGAGCGGTGGCAGCGGTGCTGTGGGTCTCCTGGCTCCCCCGGGCGGCCTGTCCGGCCGCA
GCGATAATCATGGCGGTTCTGACATCCAGATGACCCAGAGCCCCAGCAGCCTGTCTGCTAGCGTGGGCGA
CAGAGTGACCATCACCTGTAGAGCCAGCCAGAGCATCAGCAGCTACCTGAACTGGTATCAGCAGAAGCCC
GGCAAGGCCCCCAAACTGCTGATCTACGCCGCCAGCTCTCTGCAGTCTGGCGTGCCCAGCAGATTTTCCG
GCAGCGGCTCTGGCACCGACTTCACCCTGACCATCAGCTCCCTGCAGCCCGAGGACTTCGCCACCTACTA
CTGCCAGCAGGACAACGGCTACCCCAGCACCTTTGGCGGAGGTACCAAGGTGGAAATCAAGCGTTGCGAA
GTCACCCATCAGGGCCTGAGCTCGCCCGTCACAAAGAGCTTCAACAGGGGAGAGTGT
PL06-1004/GG/0001 LC amino acid sequence
(SEQ ID NO: 997)
ILYCDSWGAGCLTRPGGGSSGGSGAVGLLAPPGGLSGRSDNHGGSDIQMTQSPSSLSASVGDRVTITCRA
SQSISSYLNWYQQKPGKAPKLLIYAASSLQSGVPSRFSGSGSGTDFTLTISSLQPEDFATYYCQQDNGYP
STFGGGTKVEIKR
[spacer (SEQ ID NO: 929)][PL07-1004/GG/0001 (also referred to herein
as PL07-3001) LC (SEQ ID NO: 998)]
(SEQ ID NO: 150)
[CAAGGTCAGTCTGGATCC][GGAGGTGGCTCGAGCGGTGGCAGCGGTGCTGTGGGTCTCCTGGCTCCCC
CGGGCGGCCTGTCCGGCCGCAGCGATAATCATGGCGGTTCTGACATCCAGATGACCCAGAGCCCCAGCAG
CCTGTCTGCTAGCGTGGGCGACAGAGTGACCATCACCTGTAGAGCCAGCCAGAGCATCAGCAGCTACCTG
AACTGGTATCAGCAGAAGCCCGGCAAGGCCCCCAAACTGCTGATCTACGCCGCCAGCTCTCTGCAGTCTG
GCGTGCCCAGCAGATTTTCCGGCAGCGGCTCTGGCACCGACTTCACCCTGACCATCAGCTCCCTGCAGCC
CGAGGACTTCGCCACCTACTACTGCCAGCAGGACAACGGCTACCCCAGCACCTTTGGCGGAGGTACCAAG
GTGGAAATCAAGCGTTGCGAAGTCACCCATCAGGGCCTGAGCTCGCCCGTCACAAAGAGCTTCAACAGGG
GAGAGTGT]
[spacer (SEQ ID NO: 923)][PL01-1004/GG/0001 LC (SEQ ID NO: 999)]
(SEQ ID NO: 151)
[QGQSGS][GIALCPSHFCQLPQTGGGSSGGSGAVGLLAPPGGLSGRSDNHGGSDIQMTQSPSSLSASVG
DRVTITCRASQSISSYLNWYQQKPGKAPKLLIYAASSLQSGVPSRFSGSGSGTDFTLTISSLQPEDFATY
YCQQDNGYPSTFGGGTKVEIKR]
PL07-1004/GG/0001 LC nucleotide sequence
(SEQ ID NO: 998)
GGAGGTGGCTCGAGCGGTGGCAGCGGTGCTGTGGGTCTCCTGGCTCCCCCGGGCGGCCTGTCCGGCCGCA
GCGATAATCATGGCGGTTCTGACATCCAGATGACCCAGAGCCCCAGCAGCCTGTCTGCTAGCGTGGGCGA
CAGAGTGACCATCACCTGTAGAGCCAGCCAGAGCATCAGCAGCTACCTGAACTGGTATCAGCAGAAGCCC
GGCAAGGCCCCCAAACTGCTGATCTACGCCGCCAGCTCTCTGCAGTCTGGCGTGCCCAGCAGATTTTCCG
GCAGCGGCTCTGGCACCGACTTCACCCTGACCATCAGCTCCCTGCAGCCCGAGGACTTCGCCACCTACTA
CTGCCAGCAGGACAACGGCTACCCCAGCACCTTTGGCGGAGGTACCAAGGTGGAAATCAAGCGTTGCGAA
GTCACCCATCAGGGCCTGAGCTCGCCCGTCACAAAGAGCTTCAACAGGGGAGAGTGT
PL07-1004/GG/0001 LC amino acid sequence
(SEQ ID NO: 999)
GIALCPSHFCQLPQTGGGSSGGSGAVGLLAPPGGLSGRSDNHGGSDIQMTQSPSSLSASVGDRVTITCRA
SQSISSYLNWYQQKPGKAPKLLIYAASSLQSGVPSRFSGSGSGTDFTLTISSLQPEDFATYYCQQDNGYP
STFGGGTKVEIKR
[spacer (SEQ ID NO: 929)][PL14-1004/GG/0001 (also referred to herein
as PL14-3001) LC (SEQ ID NO: 1000)]
(SEQ ID NO: 152)
[CAAGGTCAGTCTGGATCC][GGAGGTGGCTCGAGCGGTGGCAGCGGTGCTGTGGGTCTCCTGGCTCCCC
CGGGCGGCCTGTCCGGCCGCAGCGATAATCATGGCGGTTCTGACATCCAGATGACCCAGAGCCCCAGCAG
CCTGTCTGCTAGCGTGGGCGACAGAGTGACCATCACCTGTAGAGCCAGCCAGAGCATCAGCAGCTACCTG
AACTGGTATCAGCAGAAGCCCGGCAAGGCCCCCAAACTGCTGATCTACGCCGCCAGCTCTCTGCAGTCTG
GCGTGCCCAGCAGATTTTCCGGCAGCGGCTCTGGCACCGACTTCACCCTGACCATCAGCTCCCTGCAGCC
CGAGGACTTCGCCACCTACTACTGCCAGCAGGACAACGGCTACCCCAGCACCTTTGGCGGAGGTACCAAG
GTGGAAATCAAGCGTTGCGAAGTCACCCATCAGGGCCTGAGCTCGCCCGTCACAAAGAGCTTCAACAGGG
GAGAGTGT]
[spacer (SEQ ID NO: 923)][PL14-1004/GG/0001 LC (SEQ ID NO: 1001)]
(SEQ ID NO: 153)
[QGQSGS][YLPCHFVPIGACNNKGGGSSGGSGAVGLLAPPGGLSGRSDNHGGSDIQMTOSPSSLSASVG
DRVTITCRASQSISSYLNWYQQKPGKAPKLLIYAASSLQSGVPSRFSGSGSGTDFTLTISSLQPEDFATY
YCQQDNGYPSTFGGGTKVEIKR]
PL14-1004/GG/0001 LC nucleotide sequence
(SEQ ID NO: 1000)
GGAGGTGGCTCGAGCGGTGGCAGCGGTGCTGTGGGTCTCCTGGCTCCCCCGGGCGGCCTGTCCGGCCGCA
GCGATAATCATGGCGGTTCTGACATCCAGATGACCCAGAGCCCCAGCAGCCTGTCTGCTAGCGTGGGCGA
CAGAGTGACCATCACCTGTAGAGCCAGCCAGAGCATCAGCAGCTACCTGAACTGGTATCAGCAGAAGCCC
GGCAAGGCCCCCAAACTGCTGATCTACGCCGCCAGCTCTCTGCAGTCTGGCGTGCCCAGCAGATTTTCCG
GCAGCGGCTCTGGCACCGACTTCACCCTGACCATCAGCTCCCTGCAGCCCGAGGACTTCGCCACCTACTA
CTGCCAGCAGGACAACGGCTACCCCAGCACCTTTGGCGGAGGTACCAAGGTGGAAATCAAGCGTTGCGAA
GTCACCCATCAGGGCCTGAGCTCGCCCGTCACAAAGAGCTTCAACAGGGGAGAGTGT
PL14-1004/GG/0001 LC amino acid sequence
(SEQ ID NO: 1001)
YLPCHFVPIGACNNKGGGSSGGSGAVGLLAPPGGLSGRSDNHGGSDIQMTQSPSSLSASVGDRVTITCRA
SQSISSYLNWYQQKPGKAPKLLIYAASSLQSGVPSRFSGSGSGTDFTLTISSLQPEDFATYYCQQDNGYP
STFGGGTKVEIKR
[spacer (SEQ ID NO: 929)][PL15-1004/GG/0001 (also referred to herein
as PL15-3001) LC (SEQ ID NO: 1002)]
(SEQ ID NO: 154)
[CAAGGTCAGTCTGGATCC][GGAGGTGGCTCGAGCGGTGGCAGCGGTGCTGTGGGTCTCCTGGCTCCCC
CGGGCGGCCTGTCCGGCCGCAGCGATAATCATGGCGGTTCTGACATCCAGATGACCCAGAGCCCCAGCAG
CCTGTCTGCTAGCGTGGGCGACAGAGTGACCATCACCTGTAGAGCCAGCCAGAGCATCAGCAGCTACCTG
AACTGGTATCAGCAGAAGCCCGGCAAGGCCCCCAAACTGCTGATCTACGCCGCCAGCTCTCTGCAGTCTG
GCGTGCCCAGCAGATTTTCCGGCAGCGGCTCTGGCACCGACTTCACCCTGACCATCAGCTCCCTGCAGCC
CGAGGACTTCGCCACCTACTACTGCCAGCAGGACAACGGCTACCCCAGCACCTTTGGCGGAGGTACCAAG
GTGGAAATCAAGCGTTGTGAGGCCACTCACAAGACATCAACTTCACCCATTGTCAAGAGCTTCAACAGGA
ATGAGTGT]
[spacer (SEQ ID NO: 923)][PL15-1004/GG/0001 LC (SEQ ID NO: 1003)]
(SEQ ID NO: 155)
[QGQSGS][IFCHMGVVVPQCANYGGGSSGGSGAVGLLAPPGGLSGRSDNHGGSDIQMTQSPSSLSASVG
DRVTITCRASQSISSYLNWYQQKPGKAPKLLIYAASSLQSGVPSRFSGSGSGTDFTLTISSLQPEDFATY
YCQQDNGYPSTFGGGTKVEIKR]
PL15-1004/GG/0001 LC nucleotide sequence
(SEQ ID NO: 1002)
GGAGGTGGCTCGAGCGGTGGCAGCGGTGCTGTGGGTCTCCTGGCTCCCCCGGGCGGCCTGTCCGGCCGCA
GCGATAATCATGGCGGTTCTGACATCCAGATGACCCAGAGCCCCAGCAGCCTGTCTGCTAGCGTGGGCGA
CAGAGTGACCATCACCTGTAGAGCCAGCCAGAGCATCAGCAGCTACCTGAACTGGTATCAGCAGAAGCCC
GGCAAGGCCCCCAAACTGCTGATCTACGCCGCCAGCTCTCTGCAGTCTGGCGTGCCCAGCAGATTTTCCG
GCAGCGGCTCTGGCACCGACTTCACCCTGACCATCAGCTCCCTGCAGCCCGAGGACTTCGCCACCTACTA
CTGCCAGCAGGACAACGGCTACCCCAGCACCTTTGGCGGAGGTACCAAGGTGGAAATCAAGCGTTGTGAG
GCCACTCACAAGACATCAACTTCACCCATTGTCAAGAGCTTCAACAGGAATGAGTGT
PL15-1004/GG/0001 LC amino acid sequence
(SEQ ID NO: 1003)
IFCHMGVVVPQCANYGGGSSGGSGAVGLLAPPGGLSGRSDNHGGSDIQMTQSPSSLSASVGDRVTITCRA
SQSISSYLNWYOQKPGKAPKLLIYAASSLQSGVPSRFSGSGSGTDFTLTISSLQPEDFATYYCQQDNGYP
STFGGGTKVEIKR
[spacer (SEQ ID NO: 929)][PL18-1004/GG/0001 (also referred to herein
as PL18-3001) LC (SEQ ID NO: 1004)]
(SEQ ID NO: 156)
[CAAGGTCAGTCTGGATCC][GGAGGTGGCTCGAGCGGTGGCAGCGGTGCTGTGGGTCTCCTGGCTCCCC
CGGGCGGCCTGTCCGGCCGCAGCGATAATCATGGCGGTTCTGACATCCAGATGACCCAGAGCCCCAGCAG
CCTGTCTGCTAGCGTGGGCGACAGAGTGACCATCACCTGTAGAGCCAGCCAGAGCATCAGCAGCTACCTG
AACTGGTATCAGCAGAAGCCCGGCAAGGCCCCCAAACTGCTGATCTACGCCGCCAGCTCTCTGCAGTCTG
GCGTGCCCAGCAGATTTTCCGGCAGCGGCTCTGGCACCGACTTCACCCTGACCATCAGCTCCCTGCAGCC
CGAGGACTTCGCCACCTACTACTGCCAGCAGGACAACGGCTACCCCAGCACCTTTGGCGGAGGTACCAAG
GTGGAAATCAAGCGTTGTGAGGCCACTCACAAGACATCAACTTCACCCATTGTCAAGAGCTTCAACAGGA
ATGAGTGT]
[spacer (SEQ ID NO: 923)][PL18-1004/GG/G001 LC (SEQ ID NO: 1005)]
(SEQ ID NO: 157)
[QGQSGS][PCHPHAYDARPYCNVGGGSSGGSGAVGLLAPPGGLSGRSDNHGGSDIQMTOSPSSLSASVG
DRVTITCRASQSISSYLNWYQQKPGKAPKLLIYAASSLQSGVPSRFSGSGSGTDFTLTISSLQPEDFATY
YCQQDNGYPSTFGGGTKVEIKR]
PL18-1004/GG/0001 LC nucleotide sequence
(SEQ ID NO: 1004)
GGAGGTGGCTCGAGCGGTGGCAGCGGTGCTGTGGGTCTCCTGGCTCCCCCGGGCGGCCTGTCCGGCCGCA
GCGATAATCATGGCGGTTCTGACATCCAGATGACCCAGAGCCCCAGCAGCCTGTCTGCTAGCGTGGGCGA
CAGAGTGACCATCACCTGTAGAGCCAGCCAGAGCATCAGCAGCTACCTGAACTGGTATCAGCAGAAGCCC
GGCAAGGCCCCCAAACTGCTGATCTACGCCGCCAGCTCTCTGCAGTCTGGCGTGCCCAGCAGATTTTCCG
GCAGCGGCTCTGGCACCGACTTCACCCTGACCATCAGCTCCCTGCAGCCCGAGGACTTCGCCACCTACTA
CTGCCAGCAGGACAACGGCTACCCCAGCACCTTTGGCGGAGGTACCAAGGTGGAAATCAAGCGTTGTGAG
GCCACTCACAAGACATCAACTTCACCCATTGTCAAGAGCTTCAACAGGAATGAGTGT
PL18-1004/GG/0001 LC amino acid sequence
(SEQ ID NO: 1005)
PCHPHAYDARPYCNVGGGSSGGSGAVGLLAPPGGLSGRSDNHGGSDIQMTQSPSSLSASVGDRVTITCRA
SQSISSYLNWYQQKPGKAPKLLIYAASSLQSGVPSRFSGSGSGTDFTLTISSLQPEDFATYYCQQDNGYP
STFGGGTKVEIKR
PL07-0001
[spacer (SEQ ID NO: 923)][PL07-0001 LC (SEQ ID NO: 1145)]
(SEQ ID NO: 1144)
[QGQSGS][GIALCPSHFCQLPQTGGGSSGGSGGSGGLSGRSDNHGGSDIQMTQSPSSLSASVGDRVTIT
CRASQSISSYLNWYQQKPGKAPKLLIYAASSLQSGVPSRFSGSGSGTDFTLTISSLQPEDFATYYCQQDN
GYPSTFGGGTKVEIKR]
PL07-0001 LC amino acid sequence
(SEQ ID NO: 1145)
GIALCPSHFCQLPQTGGGSSGGSGGSGGLSGRSDNHGGSDIQMTQSPSSLSASVGDRVTITCRASQSISS
YLNWYQQKPGKAPKLLIYAASSLQSGVPSRFSGSGSGTDFTLTISSLQPEDFATYYCOQDNGYPSTFGGG
TKVEIKR
PL07-0002
[spacer (SEQ ID NO: 923)][PL07-0002 LC (SEQ ID NO: 1147)]
(SEQ ID NO: 1146)
[QGQSGS][GIALCPSHFCQLPQTGGGSSGGSGGSGGLSGRSGNHGGSDIQMTQSPSSLSASVGDRVTIT
CRASQSISSYLNWYQQKPGKAPKLLIYAASSLQSGVPSRFSGSGSGTDFTLTISSLQPEDFATYYCQQDN
GYPSTFGGGTKVEIKR]
PL07-0002 LC amino acid sequence
(SEQ ID NO: 1147)
GIALCPSHFCQLPQTGGGSSGGSGGSGGLSGRSGNHGGSDIQMTQSPSSLSASVGDRVTITCRASQSISS
YLNWYQQKPGKAPKLLIYAASSLQSGVPSRFSGSGSGTDFTLTISSLQPEDFATYYCQQDNGYPSTFGGG
TKVEIKR
PL07-1001
[spacer (SEQ ID NO: 923)][PL07-1001 LC (SEQ ID NO: 1149)]
(SEQ ID NO: 1148)
[QGQSGS][GIALCPSHFCQLPQTGGGSSGGSGGSGGISSGLLSSGGSDIQMTQSPSSLSASVGDRVTIT
CRASQSISSYLNWYQQKPGKAPKLLIYAASSLQSGVPSRFSGSGSGTDFTLTISSLQPEDFATYYCQQDN
GYPSTFGGGTKVEIKR]
PL07-1001 LC amino acid sequence
(SEQ ID NO: 1149)
GIALCPSHFCQLPQTGGGSSGGSGGSGGISSGLLSSGGSDIQMTQSPSSLSASVGDRVTITCRASOSISS
YLNWYQQKPGKAPKLLIYAASSLQSGVPSRFSGSGSGTDFTLTISSLQPEDFATYYCQQDNGYPSTFGGG
TKVEIKR
PL07-1002
[spacer (SEQ ID NO: 923)][PL07-1002 LC (SEQ ID NO: 1151)]
(SEQ ID NO: 1150)
[QGQSGS][GIALCPSHFCQLPQTGGGSSGGSGGSGGQNQALRMAGGSDIQMTQSPSSLSASVGDRVTIT
CRASQSISSYLNWYQQKPGKAPKLLIYAASSLQSGVPSRFSGSGSGTDFTLTISSLQPEDFATYYCQQDN
GYPSTFGGGTKVEIKR]
PL07-1002 LC amino acid sequence
(SEQ ID NO: 1151)
GIALCPSHFCQLPQTGGGSSGGSGGSGGONQALRMAGGSDIQMTQSPSSLSASVGDRVTITCRASQSISS
YLNWYQQKPGKAPKLLIYAASSLQSGVPSRFSGSGSGTDFTLTISSLQPEDFATYYCQQDNGYPSTFGGG
TKVEIKR
PL07-1003
[spacer (SEQ ID NO: 923)][PL07-1003 LC (SEQ ID NO: 1153)]
(SEQ ID NO: 1152)
[QGQSGS][GIALCPSHFCQLPQTGGGSSGGSGGSGGVHMPLGFLGPGGSDIQMTQSPSSLSASVGDRVT
ITCRASQSISSYLNWYQQKPGKAPKLLIYAASSLQSGVPSRFSGSGSGTDFTLTISSLQPEDFATYYCQQ
DNGYPSTFGGGTKVEIKR]
PL07-1003 LC amino acid sequence
(SEQ ID NO: 1153)
GIALCPSHFCQLPQTGGGSSGGSGGSGGVHMPLGFLGPGGSDIQMTQSPSSLSASVGDRVTITCRASOSI
SSYLNWYQQKPGKAPKLLIYAASSLQSGVPSRFSGSGSGTDFTLTISSLQPEDFATYYCQQDNGYPSTFG
GGTKVEIKR
[spacer (SEQ ID NO: 923)][PL07-1004 LC (SEQ ID NO: 1201)]
(SEQ ID NO: 1200)
[QGQSGS][GIALCPSHFCQLPQTGGGSSGGSGGSGGAVGLLAPPGGSDIQMTQSPSSLSASVGDRVTIT
CRASQSISSYLNWYQQKPGKAPKLLIYAASSLQSGVPSRFSGSGSGTDFTLTISSLQPEDFATYYCQQDN
GYPSTFGGGTKVEIKR]
PL07-1004 LC amino acid sequence
(SEQ ID NO: 1201)
GIALCPSHFCQLPQTGGGSSGGSGGSGGAVGLLAPPGGSDIQMTQSPSSLSASVGDRVTITCRASQSISS
YLNWYQQKPGKAPKLLIYAASSLQSGVPSRFSGSGSGTDFTLTISSLQPEDFATYYCQQDNGYPSTFGGG
TKVEIKR
PL07-2002
[spacer (SEQ ID NO: 923)][PL07-2002 LC (SEQ ID NO: 1155)]
(SEQ ID NO: 1154)
[QGQSGS][GIALCPSHFCQLPQTGGGSSGGSGGSGGISSGLLSGRSGNHGGSDIQMTQSPSSLSASVGD
RVTITCRASQSISSYLNWYQQKPGKAPKLLIYAASSLQSGVPSRFSGSGSGTDFTLTISSLQPEDFATYY
CQQDNGYPSTFGGGTKVEIKR]
PL07-2002 LC amino acid sequence
(SEQ ID NO: 1155)
GIALCPSHFCQLPQTGGGSSGGSGGSGGISSGLLSGRSGNHGGSDIQMTQSPSSLSASVGDRVTITCRAS
QSISSYLNWYQOKPGKAPKLLIYAASSLQSGVPSRFSGSGSGTDFTLTISSLQPEDFATYYCQQDNGYPS
TFGGGTKVEIKR
PL07-2003
[spacer (SEQ ID NO: 923)][PL07-2003 LC (SEQ ID NO: 1157)]
(SEQ ID NO: 1156)
[QGQSGS][GIALCPSHFCQLPQTGGGSSGGSGGSGGISSGLLSGRSANPRGGGSDIQMTQSPSSLSASV
GDRVTITCRASQSISSYLNWYQQKPGKAPKLLIYAASSLQSGVPSRFSGSGSGTDFTLTISSLQPEDFAT
YYCQQDNGYPSTFGGGTKVEIKR]
PL07-2003 LC amino acid sequence
(SEQ ID NO: 1157)
GIALCPSHFCQLPQTGGGSSGGSGGSGGISSGLLSGRSANPRGGGSDIQMTQSPSSLSASVGDRVTITCR
ASQSISSYLNWYQQKPGKAPKLLIYAASSLQSGVPSRFSGSGSGTDFTLTISSLQPEDFATYYCQQDNGY
PSTFGGGTKVEIKR
PL07-2004
[spacer (SEQ ID NO: 923)][PL07-2004 LC (SEQ ID NO: 1159)]
(SEQ ID NO: 1158)
[QGQSGS][GIALCPSHFCQLPQTGGGSSGGSGGSGGAVGLLAPPTSGRSANPRGGGSDIQMTQSPSSLS
ASVGDRVTITCRASQSISSYLNWYQQKPGKAPKLLIYAASSLQSGVPSRFSGSGSGTDFTLTISSLQPED
FATYYCQQDNGYPSTFGGGTKVEIKR]
PL07-2004 LC amino acid sequence
(SEQ ID NO: 1159)
GIALCPSHFCQLPQTGGGSSGGSGGSGGAVGLLAPPTSGRSANPRGGGSDIQMTQSPSSLSASVGDRVTI
TCRASQSISSYLNWYQQKPGKAPKLLIYAASSLQSGVPSRFSGSGSGTDFTLTISSLQPEDFATYYCQQD
NGYPSTFGGGTKVEIKR
PL07-2005
[spacer (SEQ ID NO: 923)][PL07-2005 LC (SEQ ID NO: 1161)]
(SEQ ID NO: 1160)
[QGQSGS][GIALCPSHFCQLPQTGGGSSGGSGGSGGAVGLLAPPSGRSANPRGGGSDIQMTQSPSSLSA
SVGDRVTITCRASQSISSYLNWYQQKPGKAPKLLIYAASSLQSGVPSRFSGSGSGTDFTLTISSLQPEDF
ATYYCQQDNGYPSTFGGGTKVEIKR]
PL07-2005 LC amino acid sequence
(SEQ ID NO: 1161)
GIALCPSHFCQLPQTGGGSSGGSGGSGGAVGLLAPPSGRSANPRGGGSDIQMTQSPSSLSASVGDRVTIT
CRASQSISSYLNWYQQKPGKAPKLLIYAASSLQSGVPSRFSGSGSGTDFTLTISSLQPEDFATYYCQQDN
GYPSTFGGGTKVEIKR
PL07-2006
[spacer (SEQ ID NO: 923)][PL07-2006 LC (SEQ ID NO: 1163)]
(SEQ ID NO: 1162)
[QGQSGS][GIALCPSHFCQLPQTGGGSSGGSGGSGGISSGLLSGRSDDHGGSDIQMTQSPSSLSASVGD
RVTITCRASQSISSYLNWYQQKPGKAPKLLIYAASSLQSGVPSRFSGSGSGTDFTLTISSLQPEDFATYY
CQQDNGYPSTFGGGTKVEIKR]
PL07-2006 LC amino acid sequence
(SEQ ID NO: 1163)
GIALCPSHFCQLPQTGGGSSGGSGGSGGISSGLLSGRSDDHGGSDIQMTQSPSSLSASVGDRVTITCRAS
QSISSYLNWYQQKPGKAPKLLIYAASSLQSGVPSRFSGSGSGTDFTLTISSLQPEDFATYYCQQDNGYPS
TFGGGTKVEIKR
PL07-2007
[spacer (SEQ ID NO: 923)][PL07-2007 LC (SEQ ID NO: 1165)]
(SEQ ID NO: 1164)
[QGQSGS][GIALCPSHFCQLPQTGGGSSGGSGGSGGISSGLLSGRSDIHGGSDIQMTQSPSSLSASVGD
RVTITCRASQSISSYLNWYQQKPGKAPKLLIYAASSLQSGVPSRFSGSGSGTDFTLTISSLQPEDFATYY
CQQDNGYPSTFGGGTKVEIKR]
PL07-2007 LC amino acid sequence
(SEQ ID NO: 1165)
GIALCPSHFCQLPQTGGGSSGGSGGSGGISSGLLSGRSDIHGGSDIQMTQSPSSLSASVGDRVTITCRAS
QSISSYLNWYQQKPGKAPKLLIYAASSLQSGVPSRFSGSGSGTDFTLTISSLQPEDFATYYCQQDNGYPS
TFGGGTKVEIKR
PL07-2008
[spacer (SEQ ID NO: 923)][PL07-2008 LC (SEQ ID NO: 1167)]
(SEQ ID NO: 1166)
[QGQSGS][GIALCPSHFCQLPQTGGGSSGGSGGSGGISSGLLSGRSDQHGGSDIQMTQSPSSLSASVGD
RVTITCRASQSISSYLNWYQQKPGKAPKLLIYAASSLQSGVPSRFSGSGSGTDFTLTISSLQPEDFATYY
CQQDNGYPSTFGGGTKVEIKR]
PL07-2008 LC amino acid sequence
(SEQ ID NO: 1167)
GIALCPSHFCQLPQTGGGSSGGSGGSGGISSGLLSGRSDQHGGSDIQMTQSPSSLSASVGDRVTITCRAS
QSISSYLNWYQQKPGKAPKLLIYAASSLQSGVPSRFSGSGSGTDFTLTISSLQPEDFATYYCQQDNGYPS
TFGGGTKVEIKR
PL07-2009
[spacer (SEQ ID NO: 923)][PL07-2009 LC (SEQ ID NO: 1169)]
(SEQ ID NO: 1168)
[QGQSGS][GIALCPSHFCQLPQTGGGSSGGSGGSGGISSGLLSGRSDTHGGSDIQMTQSPSSLSASVGD
RVTITCRASQSISSYLNWYQQKPGKAPKLLIYAASSLQSGVPSRFSGSGSGTDFTLTISSLQPEDFATYY
CQQDNGYPSTFGGGTKVEIKR]
PL07-2009 LC amino acid sequence
(SEQ ID NO: 1169)
GIALCPSHFCQLPQTGGGSSGGSGGSGGISSGLLSGRSDTHGGSDIQMTQSPSSLSASVGDRVTITCRAS
QSISSYLNWYQQKPGKAPKLLIYAASSLQSGVPSRFSGSGSGTDFTLTISSLQPEDFATYYCQQDNGYPS
TFGGGTKVEIKR
PL07-2010
[spacer (SEQ ID NO: 923)][PL07-2010 LC (SEQ ID NO: 1171)]
(SEQ ID NO: 1170)
[QGQSGS][GIALCPSHFCQLPQTGGGSSGGSGGSGGISSGLLSGRSDYHGGSDIQMTQSPSSLSASVGD
RVTITCRASQSISSYLNWYQQKPGKAPKLLIYAASSLQSGVPSRFSGSGSGTDFTLTISSLQPEDFATYY
CQQDNGYPSTFGGGTKVEIKR]
PL07-2010 LC amino acid sequence
(SEQ ID NO: 1171)
GIALCPSHFCOLPQTGGGSSGGSGGSGGISSGLLSGRSDYHGGSDIQMTQSPSSLSASVGDRVTITCRAS
QSISSYLNWYQQKPGKAPKLLIYAASSLQSGVPSRFSGSGSGTDFTLTISSLQPEDFATYYCQQDNGYPS
TFGGGTKVEIKR
PL07-2011
[spacer (SEQ ID NO: 923)][PL07-2011 LC (SEQ ID NO: 1173)]
(SEQ ID NO: 1172)
[QGQSGS][GIALCPSHFCQLPQTGGGSSGGSGGSGGISSGLLSGRSDNPGGSDIQMTQSPSSLSASVGD
RVTITCRASQSISSYLNWYOQKPGKAPKLLIYAASSLQSGVPSRFSGSGSGTDFTLTISSLQPEDFATYY
CQQDNGYPSTFGGGTKVEIKR]
PL07-2011 LC amino acid sequence
(SEQ ID NO: 1173)
GIALCPSHFCQLPQTGGGSSGGSGGSGGISSGLLSGRSDNPGGSDIQMTQSPSSLSASVGDRVTITCRAS
QSISSYLNWYQQKPGKAPKLLIYAASSLQSGVPSRFSGSGSGTDFTLTISSLQPEDFATYYCQQDNGYPS
TFGGGTKVEIKR
PL07-2012
[spacer (SEQ ID NO: 923)][PL07-2012 LC (SEQ ID NO: 1175)]
(SEQ ID NO: 1174)
[QGQSGS][GIALCPSHFCQLPQTGGGSSGGSGGSGGISSGLLSGRSANPGGSDIQMTQSPSSLSASVGD
RVTITCRASQSISSYLNWYQQKPGKAPKLLIYAASSLQSGVPSRFSGSGSGTDFTLTISSLQPEDFATYY
CQQDNGYPSTFGGGTKVEIKR]
PL07-2012 LC amino acid sequence
(SEQ ID NO: 1175)
GIALCPSHFCQLPQTGGGSSGGSGGSGGISSGLLSGRSANPGGSDIQMTQSPSSLSASVGDRVTITCRAS
QSISSYLNWYQQKPGKAPKLLIYAASSLQSGVPSRFSGSGSGTDFTLTISSLQPEDFATYYCQQDNGYPS
TFGGGTKVEIKR
PL07-2013
[spacer (SEQ ID NO: 923)][PL07-2013 LC (SEQ ID NO: 1177)]
(SEQ ID NO: 1176)
[QGQSGS][GIALCPSHFCQLPQTGGGSSGGSGGSGGISSGLLSGRSANIGGSDIQMTQSPSSLSASVGD
RVTITCRASQSISSYLNWYQQKPGKAPKLLIYAASSLQSGVPSRFSGSGSGTDFTLTISSLQPEDFATYY
CQQDNGYPSTFGGGTKVEIKR]
PL07-2013 LC amino acid sequence
(SEQ ID NO: 1177)
GIALCPSHFCQLPQTGGGSSGGSGGSGGISSGLLSGRSANIGGSDIQMTQSPSSLSASVGDRVTITCRAS
QSISSYLNWYQQKPGKAPKLLIYAASSLQSGVPSRFSGSGSGTDFTLTISSLQPEDFATYYCQQDNGYPS
TFGGGTKVEIKR
PL07-2014
[spacer (SEQ ID NO: 923)][PL07-2014 LC (SEQ ID NO: 1179)]
(SEQ ID NO: 1178)
[QGQSGS][GIALCPSHFCQLPQTGGGSSGGSGGSGGISSGLLSGRSDNIGGSDIQMTQSPSSLSASVGD
RVTITCRASQSISSYLNWYOQKPGKAPKLLIYAASSLQSGVPSRFSGSGSGTDFTLTISSLQPEDFATYY
CQQDNGYPSTFGGGTKVEIKR]
PL07-2014 LC amino acid sequence
(SEQ ID NO: 1179)
GIALCPSHFCQLPQTGGGSSGGSGGSGGISSGLLSGRSDNIGGSDIQMTQSPSSLSASVGDRVTITCRAS
QSISSYLNWYQQKPGKAPKLLIYAASSLQSGVPSRFSGSGSGTDFTLTISSLQPEDFATYYCQQDNGYPS
TFGGGTKVEIKR
PL07-1004/GG/0003
[spacer (SEQ ID NO: 923)][PL07-1004/GG/0003 LC (SEQ ID NO: 1181)]
(SEQ ID NO: 1180)
[QGQSGS][GIALCPSHFCQLPQTGGGSSGGSGGSGGAVGLLAPPGGTSTSGRSANPRGGGSDIQMTQSP
SSLSASVGDRVTITCRASQSISSYLNWYQQKPGKAPKLLIYAASSLQSGVPSRFSGSGSGTDFTLTISSL
QPEDFATYYCQQDNGYPSTFGGGTKVEIKR]
PL07-1004/GG/0003 LC amino acid sequence
(SEQ ID NO: 1181)
GIALCPSHFCQLPQTGGGSSGGSGGSGGAVGLLAPPGGTSTSGRSANPRGGGSDIQMTOSPSSLSASVGD
RVTITCRASQSISSYLNWYQQKPGKAPKLLIYAASSLQSGVPSRFSGSGSGTDFTLTISSLQPEDFATYY
CQQDNGYPSTFGGGTKVEIKR

### Example 11

### Anti-PDL1 Activatable Antibodies of the Disclosure

[0623] This example demonstrates that anti-PDL1 activatable antibodies can be made in a variety of combinations of MM, CM, VL, and VH domains as well as in a variety of distinct human isotypes.

TABLE 18
Anti-PDL1 Activatable Antibody Components

| Mask Sequence | Substrate Sequence | | |
|---|---|---|---|
| (MM) | (CM) | VL | VH |
| YCEVSELFVLPWCMG | LSGRSDNH | SEQ ID NO: 12 | SEQ ID NO: 14 |
| (SEQ ID | (SEQ ID NO: 341) | | |
| NO: 208) | | | |
| SCLMHPHYAHDYCYV | TGRGPSWV | SEQ ID NO: 58 | SEQ ID NO: 16 |
| (SEQ ID | (SEQ ID NO: 338) | | |
| NO: 426) | | | |
| LCEVLMLLQHPWCMG | PLTGRSGG | | SEQ ID NO: 18 |
| (SEQ ID NO: 59) | (SEQ ID NO: 344) | | |
| IACRHFMEQLPFCHH | TARGPSFK | | SEQ ID NO: 20 |
| (SEQ ID NO: 60) | (SEQ ID NO: 340) | | |
| FGPRCGEASTCVPYE | NTLSGRSENHSG | | SEQ ID NO: 22 |
| (SEQ ID NO: 61) | (SEQ ID NO: 435) | | |
| ILYCDSWGAGCLTRP | NTLSGRSGNHGS | | SEQ ID NO: 24 |
| (SEQ ID NO: 62) | (SEQ ID NO: 436) | | |
| GIALCPSHFCQLPQT | TSTSGRSANPRG | | SEQ ID NO: 26 |
| (SEQ ID NO: 63) | (SEQ ID NO: 437) | | |
| DGPRCFVSGECSPIG | TSGRSANP | | SEQ ID NO: 28 |
| (SEQ ID NO: 64) | (SEQ ID NO: 438) | | |
| LCYKLDYDDRSYCHI | VHMPLGFLGP | | SEQ ID NO: 30 |
| (SEQ ID NO: 65) | (SEQ ID NO: 352) | | |
| PCHPHPYDARPYCNV | AVGLLAPP | | SEQ ID NO: 32 |
| (SEQ ID NO: 66) | (SEQ ID NO: 372) | | |
| PCYWHPFFAYRYCNT | AQNLLGMV | | SEQ ID NO: 34 |
| (SEQ ID NO: 67) | (SEQ ID NO: 360) | | |
| VCYYMDWLGRNWCSS | QNQALRMA | | SEQ ID NO: 36 |
| (SEQ ID NO: 68) | (SEQ ID NO: 359) | | |
| LCDLFKLREFPYCMG | LAAPLGLL | | SEQ ID NO: 38 |
| (SEQ ID NO: 69) | (SEQ ID NO: 371) | | |
| YLPCHFVPIGACNNK | STFPFGMF | | SEQ ID NO: 40 |
| (SEQ ID NO: 70) | (SEQ ID NO: 361) | | |
| IFCHMGVVVPQCANY | ISSGLLSS | | SEQ ID NO: 42 |
| (SEQ ID NO: 71) | (SEQ ID NO: 364) | | |
| ACHPHPYDARPYCNV | PAGLWLDP | | SEQ ID NO: 44 |
| (SEQ ID NO: 72) | (SEQ ID NO: 374) | | |
| PCHPAPYDARPYCNV | VAGRSMRP | | SEQ ID NO: 46 |
| (SEQ ID NO: 73) | (SEQ ID NO: 439) | | |
| PCHPHAYDARPYCNV | VVPEGRRS | | SEQ ID NO: 48 |
| (SEQ ID NO: 74) | (SEQ ID NO: 440) | | |
| PCHPHPADARPYCNV | ILPRSPAF | | SEQ ID NO: 50 |
| (SEQ ID NO: 75) | (SEQ ID NO: 441) | | |
| PCHPHPYAARPYCNV | MVLGRSLL | | SEQ ID NO: 52 |
| (SEQ ID NO: 76) | (SEQ ID NO: 442) | | |
| PCHPHPYDAAPYCNV | QGRAITFI | | SEQ ID NO: 54 |
| (SEQ ID NO: 77) | (SEQ ID NO: 443) | | |
| PCHPHPYDARPACNV | SPRSIMLA | | SEQ ID NO: 56 |
| (SEQ ID NO: 78) | (SEQ ID NO: 444) | | |
| PCHPHPYDARPYCAV | SMLRSMPL | | |
| (SEQ ID NO: 79) | (SEQ ID NO: 445) | | |
| PCHAHPYDARPYCNV | ISSGLLSGRSDNH | | |
| (SEQ ID NO: 80) | (SEQ ID NO: 377) | | |
| PCHPHPYDARAYCNV | AVGLLAPPGGLSGRSDNH | | |
| (SEQ ID NO: 81) | (SEQ ID NO: 383) | | |
| | ISSGLLSSGGSGGSLSGRSDNH | | |
| | (SEQ ID NO: 378) | | |
| | LSGRSGNH | | |
| | (SEQ ID NO: 883) | | |
| | SGRSANPRG | | |
| | (SEQ ID NO: 884) | | |
| | LSGRSDDH | | |
| | (SEQ ID NO: 885) | | |
| | LSGRSDIH | | |
| | (SEQ ID NO: 886) | | |
| | LSGRSDQH | | |
| | (SEQ ID NO: 887) | | |
| | LSGRSDTH | | |
| | (SEQ ID NO: 888) | | |
| | LSGRSDYH | | |
| | (SEQ ID NO: 889) | | |
| | LSGRSDNP | | |
| | (SEQ ID NO: 890) | | |
| | LSGRSANP | | |
| | (SEQ ID NO: 891) | | |
| | LSGRSANI | | |
| | (SEQ ID NO: 892) | | |
| | LSGRSDNI | | |
| | (SEQ ID NO: 893) | | |
| | MIAPVAYR | | |
| | (SEQ ID NO: 894) | | |
| | RPSPMWAY | | |
| | (SEQ ID NO: 895) | | |
| | WATPRPMR | | |
| | (SEQ ID NO: 896) | | |
| | FRLLDWQW | | |
| | (SEQ ID NO: 897) | | |
| | ISSGL | | |
| | (SEQ ID NO: 898) | | |
| | ISSGLLS | | |
| | (SEQ ID NO: 899) | | |
| | ISSGLL | | |
| | (SEQ ID NO: 900) | | |
| | ISSGLLSGRSANPRG | | |
| | (SEQ ID NO: 901) | | |
| | AVGLLAPPTSGRSANPRG | | |
| | (SEQ ID NO: 902) | | |
| | AVGLLAPPSGRSANPRG | | |
| | (SEQ ID NO: 903) | | |
| | ISSGLLSGRSDDH | | |
| | (SEQ ID NO: 904) | | |
| | ISSGLLSGRSDIH | | |
| | (SEQ ID NO: 905) | | |
| | ISSGLLSGRSDQH | | |
| | (SEQ ID NO: 906) | | |
| | ISSGLLSGRSDTH | | |
| | (SEQ ID NO: 907) | | |
| | ISSGLLSGRSDYH | | |
| | (SEQ ID NO: 908) | | |
| | ISSGLLSGRSDNP | | |
| | (SEQ ID NO: 909) | | |
| | ISSGLLSGRSANP | | |
| | (SEQ ID NO: 910) | | |
| | ISSGLLSGRSANI | | |
| | (SEQ ID NO: 911) | | |
| | AVGLLAPPGGLSGRSDDH | | |
| | (SEQ ID NO: 912) | | |
| | AVGLLAPPGGLSGRSDIH | | |
| | (SEQ ID NO: 913) | | |
| | AVGLLAPPGGLSGRSDQH | | |
| | (SEQ ID NO: 914) | | |
| | AVGLLAPPGGLSGRSDTH | | |
| | (SEQ ID NO: 915) | | |
| | AVGLLAPPGGLSGRSDYH | | |
| | (SEQ ID NO: 916) | | |
| | AVGLLAPPGGLSGRSDNP | | |
| | (SEQ ID NO: 917) | | |
| | AVGLLAPPGGLSGRSANP | | |
| | (SEQ ID NO: 918) | | |
| | AVGLLAPPGGLSGRSANI | | |
| | (SEQ ID NO: 919) | | |
| | ISSGLLSGRSDNI | | |
| | (SEQ ID NO: 920) | | |
| | AVGLLAPPGGLSGRSDNI | | |
| | (SEQ ID NO: 921) | | |
| | GLSGRSDNHGGAVGLLAPP | | |
| | (SEQ ID NO: 1009) | | |
| | GLSGRSDNHGGVHMPLGFLGP | | |
| | (SEQ ID NO: 1010) | | |

[0624] Any of the combinations described in Table 18 can be combined with human immunoglobulin constant regions to result in fully human IgGs including IgG1, IgG2, IgG4 or mutated constant regions to result in human IgGs with altered functions such as IgG1 N297A, IgG1 N297Q, or IgG4 S228P. The combinations described in Table 18 are not limited by the particular combinations shown in any given row and include any mask sequence from column 1 matched with any substrate sequence from column 2 matched with any VL sequence from column 3 matched with any VH sequence from column 4. In addition to the substrate sequences disclosed in column 2, any CM disclosed herein can be used.

[0625] As an example, a spacer sequence (SEQ ID NO: 923) and Mask SEQ ID NO: 63 can be combined with substrate ISSGLLSGRSDNH (SEQ ID NO: 377), VL SEQ ID NO: 58, and combined with human kappa constant domain to give SEQ ID NO: 428; or Mask SEQ ID NO: 63 can be combined with substrate ISSGLLSGRSDNH (SEQ ID NO: 377), VL SEQ ID NO: 58, and combined with human kappa constant domain to give SEQ ID NO: 1008. Furthermore, VH SEQ ID NO: 46 can be combined with human immunoglobulin heavy chain constant domains to give human IgG1 (SEQ ID NO: 430), mutated human IgG4 S228P (SEQ ID NO: 432), mutated human IgG1 N297A (SEQ ID NO: 434), or mutated human IgG1 N297Q (SEQ ID NO: 1202). Co-expression of SEQ ID NO: 427 with SEQ ID NO: 429 will yield a fully human IgG anti-PDL1 activatable antibody. Co-expression of SEQ ID NO: 427 with SEQ ID NO: 431 will yield a fully human IgG4S228P anti-PDL1 activatable antibody. Co-expression of SEQ ID NO: 427 with SEQ ID NO: 433 will yield a fully human IgG1 N297A anti-PDL1 activatable antibody. Co-expression of SEQ ID NO: 427 with a nucleic acid sequence encoding the amino acid sequence of SEQ ID NO: 1202 will yield a fully human IgG1 N297Q anti-PDL1 activatable antibody.

[Light chain sequence (SEQ ID NO: 1007) with spacer (SEQ ID NO: 1006)]
(SEQ ID NO: 427)
(SEQ ID NO: 427)
[CAGGGCCAGTCCGGCTCA][TATCTGCCCTGCCACTTCGTGCCAATCGGGGCCTGTAACAATAAGGGCG
GTGGATCTAGTGGTGGCTCAGGCGGGTCTGGCGGCATTTCCAGTGGACTCTTGTCAGGACGATCCGATAA
TCATGGCGGGTCCGACATCCAGATGACACAGAGCCCTTCTTCCCTCTCCGCAAGCGTTGGCGACAGGGTC
ACCATTACCTGTAGGGCTTCTCAGAGCATCTCAAGCTATCTGAACTGGTACCAGCAGAAACCTGGAAAGG
CTCCAAAACTGCTGATTTACGCTGCCTCCAGTCTTCAGTCAGGCGTCCCCTCCAGATTTAGCGGATCAGG
TAGTGGAACTGATTTTACCCTTACAATATCTTCTCTGCAGCCAGAGGACTTCGCCACATACTATTGTCAG
CAAGACAATGGTTACCCCAGTACATTTGGCGGAGGGACAAAGGTCGAGATCAAAAGGACCGTAGCAGCAC
CAAGCGTCTTTATTTTCCCCCCCAGTGACGAACAGCTGAAGAGCGGAACAGCTTCAGTGGTGTGTCTCCT
GAATAACTTCTATCCACGCGAGGCAAAGGTGCAGTGGAAGGTGGACAATGCACTGCAGTCTGGTAATTCC
CAAGAAAGTGTTACTGAGCAGGATTCCAAGGATTCAACTTACTCTCTGTCTAGCACCCTGACTCTTTCTA
AAGCAGATTATGAGAAGCATAAGGTCTACGCTTGCGAGGTGACCCACCAGGGGCTTTCCTCTCCAGTTAC
CAAGTCATTCAACCGGGGTGAGTGTTGATGAGAATTC]
Light chain sequence without spacer
(SEQ ID NO: 1007)
TATCTGCCCTGCCACTTCGTGCCAATCGGGGCCTGTAACAATAAGGGCGGTGGATCTAGTGGTGGCTCAG
GCGGGTCTGGCGGCATTTCCAGTGGACTCTTGTCAGGACGATCCGATAATCATGGCGGGTCCGACATCCA
GATGACACAGAGCCCTTCTTCCCTCTCCGCAAGCGTTGGCGACAGGGTCACCATTACCTGTAGGGCTTCT
CAGAGCATCTCAAGCTATCTGAACTGGTACCAGCAGAAACCTGGAAAGGCTCCAAAACTGCTGATTTACG
CTGCCTCCAGTCTTCAGTCAGGCGTCCCCTCCAGATTTAGCGGATCAGGTAGTGGAACTGATTTTACCCT
TACAATATCTTCTCTGCAGCCAGAGGACTTCGCCACATACTATTGTCAGCAAGACAATGGTTACCCCAGT
ACATTTGGCGGAGGGACAAAGGTCGAGATCAAAAGGACCGTAGCAGCACCAAGCGTCTTTATTTTCCCCC
CCAGTGACGAACAGCTGAAGAGCGGAACAGCTTCAGTGGTGTGTCTCCTGAATAACTTCTATCCACGCGA
GGCAAAGGTGCAGTGGAAGGTGGACAATGCACTGCAGTCTGGTAATTCCCAAGAAAGTGTTACTGAGCAG
GATTCCAAGGATTCAACTTACTCTCTGTCTAGCACCCTGACTCTTTCTAAAGCAGATTATGAGAAGCATA
AGGTCTACGCTTGCGAGGTGACCCACCAGGGGCTTTCCTCTCCAGTTACCAAGTCATTCAACCGGGGTGA
GTGTTGATGAGAATTC
[Light chain sequence (SEQ ID NO 1008) with spacer (SEQ ID NO: 92)]
(SEQ ID NO: 428)
(SEQ ID NO: 428)
[QGQSGS][GIALCPSHFCQLPQTGGGSSGGSGGSGGISSGLLSGRSDNHGGSDIQMTQSPSSLSASVGD
RVTITCRASQSISSYLNWYQQKPGKAPKLLIYAASSLQSGVPSRFSGSGSGTDFTLTISSLQPEDFATYY
CQQDNGYPSTFGGGTKVEIKRTVAAPSVFIFPPSDEQLKSGTASVVCLLNNFYPREAKVQWKVDNALQSG
NSQESVTEQDSKDSTYSLSSTLTLSKADYEKHKVYACEVTHQGLSSPVTKSFNRGEC]
Light chain sequence without spacer
(SEQ ID NO: 1008)
GIALCPSHFCQLPQTGGGSSGGSGGSGGISSGLLSGRSDNHGGSDIQMTQSPSSLSASVGDRVTITCRAS
QSISSYLNWYQQKPGKAPKLLIYAASSLQSGVPSRFSGSGSGTDFTLTISSLQPEDFATYYCQQDNGYPS
TFGGGTKVEIKRTVAAPSVFIFPPSDEQLKSGTASVVCLLNNFYPREAKVQWKVDNALQSGNSQESVTEQ
DSKDSTYSLSSTLTLSKADYEKHKVYACEVTHQGLSSPVTKSFNRGEC
SEQ ID NO: 429
GAAGTGCAGCTGCTCGAAAGCGGCGGAGGCTTGGTGCAGCCAGGAGGGAGCCTGCGACTGTCTTGCGCAG
CCAGCGGATTCACTTTCTCTTCCTATGCCATGAGCTGGGTTCGACAGGCACCCGGCAAAGGTCTCGAGTG
GGTGTCTAGCATCTGGCGAAACGGAATAGTTACAGTGTATGCCGATAGCGTGAAGGGTCGCTTTACTATT
TCACGGGATAATTCTAAGAACACCCTCTACCTGCAAATGAATAGCCTTAGGGCAGAAGATACCGCCGTGT
ACTACTGTGCCAAATGGTCCGCAGCCTTTGACTACTGGGGCCAGGGGACACTGGTGACCGTGTCCTCTGC
ATCAACCAAGGGGCCATCAGTGTTCCCACTCGCCCCATCTTCCAAGAGTACTTCCGGCGGAACCGCAGCC
CTTGGCTGCCTTGTTAAGGACTATTTCCCAGAACCCGTGACCGTAAGTTGGAACTCTGGCGCCCTTACTT
CTGGGGTGCACACCTTCCCAGCAGTGTTGCAGTCCAGTGGCCTTTACTCTCTGTCTAGTGTAGTGACTGT
GCCTTCCTCTAGTCTCGGTACCCAGACCTATATTTGTAATGTTAACCATAAGCCCAGCAATACAAAGGTT
GATAAGAAAGTGGAACCCAAGAGCTGCGATAAGACACATACCTGCCCACCTTGTCCAGCTCCCGAGCTGC
TGGGCGGACCCTCAGTCTTTCTCTTCCCACCTAAACCCAAGGATACCCTTATGATCTCCAGGACTCCTGA
GGTGACCTGCGTTGTGGTCGACGTGTCACATGAGGACCCTGAGGTAAAGTTTAACTGGTACGTGGACGGT
GTGGAGGTACATAACGCTAAGACTAAGCCACGAGAGGAGCAATACGCTTCCACTTACAGGGTGGTCAGCG
TCCTGACCGTTCTCCATCAGGACTGGCTGAACGGGAAGGAATATAAGTGTAAGGTTAGCAACAAAGCTCT
CCCTGCACCAATCGAGAAGACAATCAGCAAGGCAAAAGGGCAGCCTCGGGAACCTCAGGTCTACACCCTC
CCTCCTAGCAGGGAAGAGATGACAAAGAACCAGGTCTCTCTCACCTGCCTGGTGAAAGGCTTCTATCCAT
CTGACATTGCTGTGGAGTGGGAATCCAACGGCCAGCCTGAAAATAATTATAAGACCACACCCCCCGTCCT
TGATTCCGATGGATCTTTCTTCCTGTACAGTAAACTCACCGTCGACAAATCACGGTGGCAGCAAGGTAAC
GTGTTCAGCTGTTCTGTCATGCATGAGGCTCTGCATAACCATTACACACAAAAGTCTTTGTCATTGTCTC
CAGGATGATGAGAATTCATTGATCATAATCAGCCATACCAC
SEQ ID NO: 430
EVQLLESGGGLVQPGGSLRLSCAASGFTFSSYAMSWVRQAPGKGLEWVSSIWRNGIVTVYADSVKGRFTI
SRDNSKNTLYLQMNSLRAEDTAVYYCAKWSAAFDYWGQGTLVTVSSASTKGPSVFPLAPSSKSTSGGTAA
LGCLVKDYFPEPVTVSWNSGALTSGVHTFPAVLQSSGLYSLSSVVTVPSSSLGTQTYICNVNHKPSNTKV
DKKVEPKSCDKTHTCPPCPAPELLGGPSVFLFPPKPKDTLMISRTPEVTCVVVDVSHEDPEVKFNWYVDG

[chemical structure]

PPSREEMTKNQVSLTCLVKGFYPSDIAVEWESNGQPENNYKTTPPVLDSDGSFFLYSKLTVDKSRWQQGN
VFSCSVMHEALHNHYTQKSLSLSPG
SEQ ID NO: 431
GAAGTGCAGCTGCTCGAAAGCGGCGGAGGCTTGGTGCAGCCAGGAGGGAGCCTGCGACTGTCTTGCGCAG
CCAGCGGATTCACTTTCTCTTCCTATGCCATGAGCTGGGTTCGACAGGCACCCGGCAAAGGTCTCGAGTG
GGTGTCTAGCATCTGGCGAAACGGAATAGTTACAGTGTATGCCGATAGCGTGAAGGGTCGCTTTACTATT
TCACGGGATAATTCTAAGAACACCCTCTACCTGCAAATGAATAGCCTTAGGGCAGAAGATACCGCCGTGT
ACTACTGTGCCAAATGGTCCGCAGCCTTTGACTACTGGGGCCAGGGGACACTGGTGACCGTGTCCTCTGC
ATCAACCAAGGGGCCATCAGTGTTCCCACTCGCCCCATGTAGCAGATCAACATCTGAATCCACCGCAGCC
CTTGGCTGCCTTGTTAAGGACTATTTCCCAGAACCCGTGACCGTAAGTTGGAACTCTGGCGCCCTTACTT
CTGGGGTGCACACCTTCCCAGCAGTGTTGCAGTCCAGTGGCCTTTACTCTCTGTCTAGTGTAGTGACTGT
GCCTTCCTCTAGTCTCGGTACCAAGACCTATACCTGCAACGTAGATCATAAGCCCAGCAATACAAAGGTT
GATAAGAGAGTAGAGTCAAAGTACGGCCCACCCTGCCCACCTTGTCCAGCTCCCGAGTTCCTGGGCGGAC
CCTCAGTCTTTCTCTTCCCACCTAAACCCAAGGATACCCTTATGATCTCCAGGACTCCTGAGGTGACCTG
CGTTGTGGTCGACGTGTCACAAGAGGACCCTGAGGTACAGTTTAACTGGTACGTGGACGGTGTGGAGGTA
CATAACGCTAAGACTAAGCCACGAGAGGAGCAATTTAACTCCACTTACAGGGTGGTCAGCGTCCTGACCG
TTCTCCATCAGGACTGGCTGAACGGGAAGGAATATAAGTGTAAGGTTAGCAACAAAGGTCTGCCCAGTTC
TATCGAGAAGACAATCAGCAAGGCAAAAGGGCAGCCTCGGGAACCTCAGGTCTACACCCTCCCTCCTAGC
CAGGAAGAGATGACAAAGAACCAGGTCTCTCTCACCTGCCTGGTGAAAGGCTTCTATCCATCTGACATTG
CTGTGGAGTGGGAATCCAACGGCCAGCCTGAAAATAATTATAAGACCACACCCCCCGTCCTTGATTCCGA
TGGATCTTTCTTCCTGTACAGTCGCCTCACCGTCGACAAATCACGGTGGCAGGAAGGTAACGTGTTCAGC
TGTTCTGTCATGCATGAGGCTCTGCATAACCATTACACACAAAAGTCTTTGTCATTGTCTCTCGGATGAT
GAGAATTCATTGATCATAATCAGCCATACCAC
SEQ ID NO: 432
EVQLLESGGGLVQPGGSLRLSCAASGFTFSSYAMSWVRQAPGKGLEWVSSIWRNGIVTVYADSVKGRFTI
SRDNSKNTLYLQMNSLRAEDTAVYYCAKWSAAFDYWGQGTLVTVSSASTKGPSVFPLAPCSRSTSESTAA
LGCLVKDYFPEPVTVSWNSGALTSGVHTFPAVLQSSGLYSLSSVVTVPSSSLGTKTYTCNVDHKPSNTKV

[chemical structure]

HNAKTKPREEQFNSTYRVVSVLTVLHQDWLNGKEYKCKVSNKGLPSSIEKTISKAKGQPREPQVYTLPPS
QEEMTKNQVSLTCLVKGFYPSDIAVEWESNGQPENNYKTTPPVLDSDGSFFLYSRLTVDKSRWQEGNVFS
CSVMHEALHNHYTQKSLSLSLG
SEQ ID NO: 433
GAAGTGCAGCTGCTCGAAAGCGGCGGAGGCTTGGTGCAGCCAGGAGGGAGCCTGCGACTGTCTTGCGCAG
CCAGCGGATTCACTTTCTCTTCCTATGCCATGAGCTGGGTTCGACAGGCACCCGGCAAAGGTCTCGAGTG
GGTGTCTAGCATCTGGCGAAACGGAATAGTTACAGTGTATGCCGATAGCGTGAAGGGTCGCTTTACTATT
TCACGGGATAATTCTAAGAACACCCTCTACCTGCAAATGAATAGCCTTAGGGCAGAAGATACCGCCGTGT
ACTACTGTGCCAAATGGTCCGCAGCCTTTGACTACTGGGGCCAGGGGACACTGGTGACCGTGTCCTCTGC
ATCAACCAAGGGGCCATCAGTGTTCCCACTCGCCCCATCTTCCAAGAGTACTTCCGGCGGAACCGCAGCC
CTTGGCTGCCTTGTTAAGGACTATTTCCCAGAACCCGTGACCGTAAGTTGGAACTCTGGCGCCCTTACTT
CTGGGGTGCACACCTTCCCAGCAGTGTTGCAGTCCAGTGGCCTTTACTCTCTGTCTAGTGTAGTGACTGT
GCCTTCCTCTAGTCTCGGTACCCAGACCTATATTTGTAATGTTAACCATAAGCCCAGCAATACAAAGGTT
GATAAGAAAGTGGAACCCAAGAGCTGCGATAAGACACATACCTGCCCACCTTGTCCAGCTCCCGAGCTGC
TGGGCGGACCCTCAGTCTTTCTCTTCCCACCTAAACCCAAGGATACCCTTATGATCTCCAGGACTCCTGA
GGTGACCTGCGTTGTGGTCGACGTGTCACATGAGGACCCTGAGGTAAAGTTTAACTGGTACGTGGACGGT
GTGGAGGTACATAACGCTAAGACTAAGCCACGAGAGGAGCAATACGCTTCCACTTACAGGGTGGTCAGCG
TCCTGACCGTTCTCCATCAGGACTGGCTGAACGGGAAGGAATATAAGTGTAAGGTTAGCAACAAAGCTCT
CCCTGCACCAATCGAGAAGACAATCAGCAAGGCAAAAGGGCAGCCTCGGGAACCTCAGGTCTACACCCTC
CCTCCTAGCAGGGAAGAGATGACAAAGAACCAGGTCTCTCTCACCTGCCTGGTGAAAGGCTTCTATCCAT
CTGACATTGCTGTGGAGTGGGAATCCAACGGCCAGCCTGAAAATAATTATAAGACCACACCCCCCGTCCT
TGATTCCGATGGATCTTTCTTCCTGTACAGTAAACTCACCGTCGACAAATCACGGTGGCAGCAAGGTAAC
GTGTTCAGCTGTTCTGTCATGCATGAGGCTCTGCATAACCATTACACACAAAAGTCTTTGTCATTGTCTC
CAGGATGATGAGAATTCATTGATCATAATCAGCCATACCAC
SEQ ID NO: 434
EVQLLESGGGLVQPGGSLRLSCAASGFTFSSYAMSWVRQAPGKGLEWVSSIWRNGIVTVYADSVKGRFTI
SRDNSKNTLYLQMNSLRAEDTAVYYCAKWSAAFDYWGQGTLVTVSSASTKGPSVFPLAPSSKSTSGGTAA
LGCLVKDYFPEPVTVSWNSGALTSGVHTFPAVLQSSGLYSLSSVVTVPSSSLGTQTYICNVNHKPSNTKV
DKKVEPKSCDKTHTCPPCPAPELLGGPSVFLFPPKPKDTLMISRTPEVTCVVVDVSHEDPEVKFNWYVDG

[chemical structure]

PPSREEMTKNQVSLTCLVKGFYPSDIAVEWESNGQPENNYKTTPPVLDSDGSFFLYSKLTVDKSRWQQGN
VFSCSVMHEALHNHYTQKSLSLSPG
SEQ ID NO: 1202
EVQLLESGGGLVQPGGSLRLSCAASGFTFSSYAMSWVRQAPGKGLEWVSSIWRNGIVTVYADSVKGRFTI
SRDNSKNTLYLQMNSLRAEDTAVYYCAKWSAAFDYWGQGTLVTVSSASTKGPSVFPLAPSSKSTSGGTAA
LGCLVKDYFPEPVTVSWNSGALTSGVHTFPAVLQSSGLYSLSSVVTVPSSSLGTQTYICNVNHKPSNTKV
DKKVEPKSCDKTHTCPPCPAPELLGGPSVFLFPPKPKDTLMISRTPEVTCVVVDVSHEDPEVKFNWYVDG

[chemical structure]

PPSREEMTKNQVSLTCLVKGFYPSDIAVEWESNGQPENNYKTTPPVLDSDGSFFLYSKLTVDKSRWQQGN
VFSCSVMHEALHNHYTQKSLSLSPG

[0626] Additional examples of heavy chain constant domains include, but are not limited to, a heavy chain constant region having a mutation or deletion at one or more of the following amino acids: Ser 228, Leu234, Leu235, Gly236, Gly237, Asp265, Asp270, Asn297, Lys 320, Lys 322, Glu328, Pro329, Pro331 as numbered in the EU index as set forth in Kabat, such that the Fc domain has less affinity for a Fc-gamma receptor.

### Example 12

### Evaluation of Efficiency of Masking Moieties

[0627] This assay measures the ability of the masking peptide to block binding of the activatable antibody to antigen as compared to the binding of the unmodified antibody to antigen.

[0628] The general outline for this assay is as follows: Nunc, Maxisorp plates are coated overnight at 4° C. with 100 μl/well of a 1 μg/mL solution of human PDL1 (R & D Systems) in PBS, pH 7.4. Plates are washed 3 times with PBST (PBS, pH 7.4, 0.05% Tween-20), and wells are blocked with 200 ml/well of 10 mg/mL BSA in PBST for 2 hours at RT. Plates are washed 3 times with PBST (PBS, pH 7.4, 0.05% Tween-20). Dilution curves are prepared, in 10 mg/mL BSA in PBST, as shown below in Table 10.

TABLE 10
Plate layout for masking efficiency
assay, one plate for each time point.

| | | [activatable | [activatable | [activatable |
|---|---|---|---|---|
| | [Antibody] = | antibody 1] = | antibody 2] = | antibody 3] = |
| | nM | nM | nM | nM |
| | Columns 1-3 | Columns 4-6 | Columns 7-9 | Columns 10-12 |
| A | 37 | 1000 | 1000 | 1000 |
| B | 12.3 | 333 | 333 | 333 |
| C | 4.1 | 111 | 111 | 111 |
| D | 1.34 | 37 | 37 | 37 |
| E | 0.45 | 12.3 | 12.3 | 12.3 |
| F | 0.15 | 4.1 | 4.1 | 4.1 |
| G | 0.03 | 1.34 | 1.34 | 1.34 |
| H | 0.01 | 0.45 | 0.45 | Blank |

[0629] The binding solutions are added to the plates, which are then are incubated for 1 hour at room temperature (RT), and then washed 3 times with PBST (PBS, pH 7.4, 0.05% Tween-20). One hundred (100) μl/well 1:4000 dilution goat-anti-human IgG (Fab specific, Sigma cat #A0293) in 10 mg/mL BSA in PBST is added, and the plate is incubated for 1 hour at RT. The plate is developed with TMB and 1N HCl. Shown in FIGS. 15A, 15B, 16A, and 17A are plots of binding isotherms for anti-PDL1 activatable antibodies that include the anti-PDL1 antibody C5H9v2 described herein. Plots are generated in Prizm (Sigma Plot) and the data are fit to a model of single site saturation and a Kd is determined. In FIG. 17A, PL03+ is an effector positive activatable antibody, namely wild type IgG1. PL03- is an effector negative activatable antibody, namely mutated IgG1 N297Q.

[0630] Masking efficiency is calculated by dividing the Kd for binding of the activatable antibodies by the Kd of the parental antibody. Masking efficiencies are shown in FIGS. 15A, 15B, 16A, AND 17A.

### Example 13

### Anti-PDL1 Activatable Antibodies of the Disclosure Delay Induction of Diabetes in NOD Mice

[0631] In this Example, anti-PDL1 activatable antibodies PL15-0003-C5H9v2 and PL18-0003-C5H9v2 were analyzed for the ability to induce diabetes in NOD mice. The NOD mice, substrain NOD/ShiLtJ, were obtained from Jackson Laboratory at 6 weeks and acclimated on site. At 9.5 weeks, mice were checked for diabetes prior to enrollment, grouped, and dosed as set forth in Table 19.

TABLE 19
Groups and doses for diabetes study with anti-PDL1 activatable antibodies

| | | | | Dose | | |
|---|---|---|---|---|---|---|
| | | | | volume | | |
| Group | Count | Treatment | Dose (mg/kg) | (mL/kg) | Schedule | Route |
| 1 | 8 | mIgG2a (C1.18.4) | 3 | 10 | Day 0 | IP |
| 2 | 8 | Anti-PDL1 (C5H9v2) | 1 | 10 | Day 0 | IP |
| 3 | 8 | Anti-PDL1 (C5H9v2) | 0.3 | 10 | Day 0 | IP |
| 4 | 8 | Activatable Antibody | 1 | 10 | Day 0 | IP |
| | | PL15-0003-C5H9v2 | | | | |
| 5 | 8 | Activatable Antibody | 1 | 10 | Day 0 | IP |
| | | PL18-0003-C5H9v2 | | | | |

[0632] FIG. 18A, which plots % non-diabetic versus number of days post initial dose, shows that anti-PDL1 antibody C5H9v2 induced diabetes in NOD mice at 1 mg/kg while the anti-PDL1 activatable antibody PL15-0003-C5H9v2 (labeled herein as Gr4-PF15) did not induce diabetes and the anti-PDL1 activatable antibody PL18-0003-C5H9v2 exhibited delayed diabetes at 1 mg/kg. Control mIgG2a and anti-PDL1 antibody C5H9v2 at 0.3 mg/kg did not induce diabetes in NOD mice. In an additional group, a single 3 mg/kg dose of anti-PDL1 activatable antibody PL15-0003-C5H9v2 administered IP at a dose volume of 10 mL/kg induced diabetes in 2 of 8 mice (75% non-diabetic), providing a greater than three-fold safety margin relative to anti-PDL1 antibody C5H9v2 (Group 2). Results are shown in FIG. 18B.

### Example 14

### Anti-PDL1 Activatable Antibodies of the Disclosure Reduce MC38 Tumors in Mice

[0633] In this Example, anti-PDL1 activatable antibodies PL15-0003-C5H9v2 and PL18-0003-C5H9v2 were analyzed for the ability to reduce the growth of MC38 syngeneic tumors.

[0634] The mouse colon carcinoma cell line MC38 was obtained from ATCC. MC38 were grown in RPMI-1640 supplemented with 10% fetal bovine serum at 37° C. in an atmosphere of 5% CO₂ in air. Cells were harvested during the logarithmic growth period, resuspended in PBS with proper cell concentration, and kept on ice for tumor induction.

[0635] Each mouse was inoculated subcutaneously in the right flank with 0.5×10⁶ of MC38 cells in PBS for tumor development. The treatments were started when the mean tumor size reached approximately 100-200 mm³ (no more than 200 mm³). Tumor sizes were measured twice weekly in two dimensions using a caliper, and the volume was expressed in mm³ using the formula: V=0.5 a×b² where a and b are the long and short diameters of the tumor, respectively.

[0636] The mice were grouped and dosed as set forth in Table 20.

TABLE 20
Groups and doses for MC38 syngeneic study with anti-PDL1 activatable
antibodies

| | | | | Dose | | |
|---|---|---|---|---|---|---|
| | | | Dose | volume | | |
| Group | Count | Treatment | (mg/kg) | (mL/kg) | Schedule | Route |
| 1 | 9 | mIgG2a | 10 | 10 | t.i.w. for 2 | IP |
| | | (C1.18.4) | | | weeks | |
| 2 | 9 | Anti- | 10 | 10 | t.i.w. for 2 | IP |
| | | PDL1 | | | weeks | |
| | | (C5H9v2) | | | | |
| 4 | 9 | PL18-0003- | 10 | 10 | t.i.w. for 2 | IP |
| | | C5H9v2 | | | weeks | |
| 6 | 9 | PL15-0003- | 10 | 10 | t.i.w. for 2 | IP |
| | | C5H9v2 | | | weeks | |

[0637] FIG. 19A, which plots tumor volume versus number of days post initial dose, demonstrates that anti-PDL1 activatable antibodies PL15-0003-C5H9v2 and PL18-0003-C5H9v2 inhibited the growth of MC38 syngeneic tumors similar to positive control anti-PDL1 antibody C5H9v2.

### Example 15

### An Anti-PDL1 Activatable Antibody of the Disclosure Demonstrates Reduced PDL1 Occupancy in Blood and Spleen from C57Bl/6 Mice

[0638] Unlike an antibody that would bind target antigen indiscriminately, an activatable antibody would be a molecule that is inert unless it is activated in the tumor microenvironment. Once activated, the cleaved activatable antibody would bind the targeted antigen within the tumor only, sparing the antigens in the peripheral areas. PDL1 is expressed in tumor cells as well as T cells (CD4+ and CD8+) in circulation and the spleen. This example demonstrates that animals treated with anti-PDL1 activatable antibody did not have detectable activatable antibody on T cells in the periphery, while animals treated with anti-PDL1 antibody showed a detectable dose dependent presence of antibody on T cells in the periphery.

[0639] To measure whether anti-PDL1 activatable antibody PL15-0003-C5H9v2 is protected from binding T cells in circulation and the spleen compared to the anti-PDL1 antibody C5H9v2, 14-week old C57Bl/6 mice (with tumors ranging from 38-671 mm3) were dosed as set forth in Table 21. Tumor sizes were measured in two dimensions using a caliper, and the volume was expressed in mm³ using the formula: V=0.5 a×b² where a and b are the long and short diameters of the tumor, respectively. After about 20 hours, animals were euthanized; and blood, spleen, and plasma were harvested from each animal.

TABLE 21
Groups and doses for PDL1 occupancy study

| | | | | Dose | | |
|---|---|---|---|---|---|---|
| | | | Dose | volume | Sched- | |
| Group | Count | Treatment | (mg/kg) | (mL/kg) | ule | Route |
| 1 | 2 | mIgG2a (C1.8.4) | 1 | 10 | Day 0 | IP |
| 2 | 2 | Anti- | 1 | 10 | Day 0 | IP |
| | | PDL1 (C5H9v2) | | | | |
| 3 | 2 | Anti- | 0.3 | 10 | Day 0 | IP |
| | | PDL1 (C5H9v2) | | | | |
| 4 | 2 | Anti- | 0.1 | 10 | Day 0 | IP |
| | | PDL1 (C5H9v2) | | | | |
| 5 | 2 | PL15-0003- | 1 | 10 | Day 0 | IP |
| | | C5H9v2 | | | | |
| 6 | 2 | PL15-0003- | 0.3 | 10 | Day 0 | IP |
| | | C5H9v2 | | | | |

[0640] Whole blood was processed as follows: One volume of blood was added to 10 volumes of RBC Lysis Solution (130-094-183 Miltenyi Biotec) and processed using manufacturer's protocol. Lymphocytes were resuspended in staining buffer (HBSS 2% FBS). Spleen was processed as follows: Spleen was placed in a 70 uM cell strainer (352350 Corning/BD Falcon) with 1 mL of serum free RPMI-1640. The back of a 3-mL syringe was used to mash the spleen in a circular motion. The strainer was washed with media. Splenocytes were pelleted using a centrifuge and blood was lysed using 10 volumes of RBC Lysis Solution (130-094-183 Miltenyi Biotec) according to manufacturer's protocol. Splenocytes were refiltered after resuspending in staining buffer (HBSS 2% FBS). Lymphocytes from whole blood and lymphocytes from spleen were counted and were aliquoted to wells of a 96-well round bottom plates (5e5 cells/well). Cells were pelleted and mouse FcR Reagent was added 1:10 dilution according to manufacturer's protocol (130-092-575 Miltenyi Biotec). One set of cells was stained with a saturating amount, 100 nM, of anti-PDL1 antibody C5H9v2 for 60 minutes to obtain a maximum saturation value. Cells were washed 3 times and are stained with a biotinylated ‘a’ allotype antibody, anti-mIgG2a (a) clone 8.3 (553502 BD Biosciences) at 300 ng/mL for 60 minutes. Cells were washed 3 times and then stained with 1 ug/mL (also referred to herein as “μg/mL”) of anti-CD4-Pacific Blue (558107 BD Bioscience), 1 ug/mL of anti-CD8-APC (553035 BD Bioscience) and 1:500 dilution of SAPE (S-866 Life Technologies) for 30 minutes. Cells were washed 2 times and stained with 7-AAD according to manufacturer's protocol (559925 BD Bioscience). The MACSQuant flow cytometer was used to measure the amount of anti-PDL1 antibody C5H9v2 and anti-PDL1 activatable antibody PL15-0003-C5H9v2 bound to T cells from whole blood and the spleen. Briefly, at the most 30,000 events were collected in the lymphocyte gate. Live cells were gated from the 7AAD negative gate. CD4+ and CD8+ cells were gated separately and anti-PDL1 mAb and anti-PDL1 activatable antibody MFI were recorded for both CD4 and CD8. Percent occupancy was determined by taking the MFI of the sample compared to the average of the MFI for the maximum binding MFI. FIGS. 20A-20D demonstrate the percent of anti-PDL1 antibody C5H9v2 and anti-PDL1 activatable antibody PL15-0003-C5H9v2 bound to CD4+ and CD8+ T cells from peripheral blood (FIGS. 20A, 20B) or spleen (FIGS. 20C, 20D). In all graphs, the circle represents isotype, the square represents anti-PDL1 antibody C5H9v2, and the triangle represents anti-PDL1 activatable antibody PL15-0003-C5H9v2. Percent occupancy of the anti-PDL1 antibody C5H9v2 was reflective of the dose titration. Percent occupancy of the anti-PDL1 activatable antibody PL15-0003-C5H9v2 at 1 mg/kg was similar to isotype control mIgG2a at 1 mg/kg.

### Example 16

### An Anti-PDL1 Activatable Antibody of the Disclosure Demonstrates Reduced PDL1 Occupancy in Blood and Spleen from C57Bl/6 Mice

[0641] This example demonstrates that animals treated with an anti-PDL1 activatable antibody of the disclosure exhibited reduced binding to blood T cells from tumor bearing mice compared to that exhibited by an anti-PDL1 antibody of the disclosure at a variety of doses.

[0642] The study was conducted in a manner similar to that described in Example 15. Briefly, mice bearing MC38 tumors between 100-200 mm³ were treated with a single dose of anti-PDL1 antibody C5H9v2 or anti-PDL1 activatable antibody PL15-0003-C5H9v2 as indicated in FIGS. 21A and 21B, and blood was analyzed for surface bound antibody by flow cytometry four days after dosing. Plasma concentrations of the antibody and activatable antibody were determined by ELISA. FIGS. 21A and 21 B demonstrate that the presence of tumor-derived proteases capable of cleaving the activatable antibody did not lead to high levels of activated activatable antibody in the blood (FIG. 21A); i.e., the activatable antibody (depicted by squares) demonstrated reduced peripheral PDL1 binding in tumor-bearing mice compared to the antibody (depicted by circles) or an isotype antibody (depicted by triangles) despite the plasma concentrations of the activatable antibody being higher than those of the antibody (FIG. 21B).

### Example 17

### Activity of an Anti-PDL1 Antibody and an Anti-PDL1 Activatable Antibody of the Embodiments in a Human T-Cell Restimulation Assay

[0643] In this example, peripheral blood mononuclear cells from a CMV-positive donor were incubated in the presence of CMV viral lysate and an anti-PDL1 antibody or an anti-PDL1 activatable antibody of the disclosure to assess the effect of such anti-PDL1 antibody or anti-PDL1 activatable antibody on interferon gamma (IFN-gamma) cytokine secretion.

[0644] PBMCs from a CMV-positive donor (Hemacare Donor C) were plated at 3.5×10⁵ cells per well in the presence of 4 μg/mL CMV viral lysate (Astarte) and either anti-PDL1 antibody C5H9v2, anti-PDL1 activatable antibody PL07-2001-C5H9v2, or an hIgG4 isotype control antibody. After four days, supernatant was removed from each well and IFN-gamma levels were assayed using IFN-gamma ELISA kit (Life Technologies, Carlsbad, Calif.). FIG. 22A demonstrates that anti-PDL1 activatable antibody PL07-2001-C5H9v2 exhibited increased CMV-stimulated IFN-gamma secretion compared with control hIgG4 but decreased potency relative to anti-PDL1 parental antibody C5H9v2 due to the activatable antibody being masked.

### Example 18

### In Situ Imaging of an Anti-PDL1 Activatable Antibody of the Disclosure

[0645] This Example demonstrates the ability of anti-PDL1 activatable antibody PL15-0003-C5H9v2 to be activated and to bind frozen MC38 mouse cancer tissues using an in situ imaging method.

[0646] Fluorescently-labeled anti-PDL1 activatable antibody PL15-0003-C5H9v2 or anti-PDL1 antibody C5H9v2 was incubated on frozen PDL1+MC38 tumor sections for 1 hour in a protease-compatible buffer in the presence or absence of a broad spectrum inhibitor cocktail as described in PCT International publication number WO 2014/107599, published Jul. 10, 2014.

[0647] Results are shown in FIGS. 23A-23D. The tissue image in FIG. 23A demonstrates binding of anti-PDL1 antibody C5H9v2 to the tumor section indicating the presence of PDL1 antigen in the tumor section. The tissue image in FIG. 23B demonstrates that anti-PDL1 activatable antibody PL5-0003-C5H9v2 was activated by tumor-derived proteolytic cleavage of the anti-PDL1 activatable antibody to yield an anti-PDL1 antibody that bound to the PDL1 target in the tumor section. The tissue image in FIG. 23D demonstrates that the fluorescent signal shown in FIG. 23B was inhibited by pre-treatment of the tumor section with a 1:100 dilution of broad spectrum inhibitor cocktail set III and 50 mM EDTA, whereas no effect of broad spectrum protease inhibitors was detected on the binding of anti-PDL1 antibody C5H9v2 to the tumor section as demonstrated in the tissue image in FIG. 23C. These results demonstrate that the tumor sections comprise sufficient protease activity to activate activatable antibodies of the disclosure.

### Example 19

### Ability of an Activatable Antibody of the Disclosure to Demonstrate Protease-Dependent Binding and Blocking Activity In Vitro

[0648] This Example demonstrates the ability anti-PDL1 activatable antibody PL15-0003-C5H9v2 to exhibit protease-dependent binding and blocking activity in vitro.

[0649] Binding and blocking studies were conducted on anti-PDL1 antibody C5H9v2 and anti-PDL1 activatable antibody PL15-0003-C5H9v2 in a manner similar to those described elsewhere in the Examples except that plates were coated with 0.5 μg/mL PDL1.

[0650] FIG. 24A depicts that anti-PDL1 activatable antibody PL15-0003-C5H9v2 exhibited a higher EC₅₀ for PDL1 binding and PD1 blocking than did the anti-PDL1 antibody as measured by ELISA. The figure further demonstrates that activation of anti-PDL1 activatable antibody PL15-0003-C5H9v2 by matriptase fully restored PDL1 binding and PD1 blocking activities to levels comparable to those of anti-PDL1 antibody C5H9v2.

### Example 20

### Ability of an Anti-PDL1 Activatable Antibody of the Disclosure to Reduce Binding to PDL1 and to Demonstrate Protease-Dependent Blocking Activity In Vitro

[0651] This Example measures the ability of a masking peptide to reduce binding of an anti-PDL1 activatable antibody of the disclosure to PDL1 compared to the ability of the parental antibody to bind to PDL1 in vitro. This Example also demonstrates the ability of an anti-PDL1 activatable antibody of the disclosure to exhibit protease-dependent blocking activity in vitro.

[0652] The abilities of anti-PDL1 activatable antibodies PL07-2001-C5H9v2 and PF07-3001-C5H9v2 and anti-PDL1 antibody C5H9 to bind to human or murine PDL1 were tested in a manner similar to techniques described elsewhere in the Examples. Results are shown in FIGS. 25A and B.

[0653] The abilities of anti-PDL1 activatable antibody PL07-2001-C5H9v2, uPA-activated anti-PDL1 activatable antibody PL07-2001-C5H9v2, MMP14-activated anti-PDL1 activatable antibody PL07-2001-C5H9v2, and anti-PDL1 antibody C5H9v2 to block PD1 (PD-1) or B7-1 binding to PDL1 were tested in a manner similar to techniques described elsewhere in the Examples.

[0654] Briefly, for the PD1 blockade assay, human, cyno or rat PDL1 was adsorbed to the well of an ELISA plate. Biotinylated human, cyno, or rat PD1 was applied to the wells in the absence or presence of an increasing concentration of either anti-PDL1 activatable antibody PL07-2001-C5H9v2, uPA-activated anti-PDL1 activatable antibody PL07-2001-C5H9v2, MMP14-activated anti-PDL1 activatable antibody PL07-2001-C5H9v2, or anti-PDL1 antibody C5H9v2. Results, shown in FIGS. 26A to C, indicate that activatable antibody PF07-2001-C5H9v2 exhibited a higher EC₅₀ for PD1 blocking than did the anti-PDL1 antibody as measured by ELISA. However, activation of the activatable antibody by either uPA or MMP14 restored PD1 blocking activity to levels comparable to those of anti-PDL1 antibody C5H9v2.

[0655] Briefly, for the B7-1 blockade assay, human or cyno PDL1 was adsorbed to the well of an ELISA plate. Biotinylated human or cyno B7-1 was applied to the wells in the absence or presence of an increasing concentration of either anti-PDL1 activatable antibody PL07-2001-C5H9v2, uPA-activated anti-PDL1 activatable antibody PL07-2001-C5H9v2, MMP14-activated anti-PDL1 activatable antibody PL07-2001-C5H9v2, or anti-PDL1 antibody C5H9v2. Results, shown in FIGS. 27A and B, indicate that activatable antibody PF07-2001-C5H9v2 exhibited a higher EC₅₀ for B7-1 blocking than did the anti-PDL1 antibody as measured by ELISA. However, activation of the activatable antibody by either uPA or MMP14 restored B7-1 blocking activity to levels comparable to those of anti-PDL1 antibody C5H9v2.

### Example 21

### Anti-PDL1 Activatable Antibodies of the Disclosure Reduce MC38 Tumors in Mice

[0656] In this Example, anti-PDL1 activatable antibodies PL15-0003-C5H9v2, PL15-2001-C5H9v2, and PL15-3001-C5H9v2 were analyzed for the ability to reduce the growth of MC38 syngeneic tumors.

[0657] The mouse colon carcinoma cell line MC38 was obtained from ATCC. MC38 were grown in RPMI-1640 supplemented with 10% fetal bovine serum at 37° C. in an atmosphere of 5% CO₂ in air. Cells were harvested during the logarithmic growth period, resuspended in PBS with proper cell concentration, and kept on ice for tumor induction.

[0658] Each mouse was inoculated subcutaneously in the right flank with 0.5×10⁶ of MC38 cells in PBS for tumor development. The treatments were started when the mean tumor size reached approximately 100-200 mm³ (no more than 200 mm³). Tumor sizes were measured twice weekly in two dimensions using a caliper, and the volume was expressed in mm³ using the formula: V=0.5 a×b² where a and b are the long and short diameters of the tumor, respectively.

[0659] The mice were grouped and dosed as set forth in Table 24.

TABLE 24
Groups and doses for MC38 syngeneic study with anti-PDL1 activatable antibodies

| | | | Dose | Dose volume | | |
|---|---|---|---|---|---|---|
| Group | Count | Treatment | (mg/kg) | (mL/kg) | Schedule | Route |
| 1 | 9 | mIgG2a (C1.18.4) | 5 | 10 | b.i.w.; 4 doses | IP |
| 2 | 9 | Anti-PDL1 (C5H9v2) | 5 | 10 | b.i.w.; 4 doses | IP |
| 3 | 9 | PL15-0003-C5H9v2 | 5 | 10 | b.i.w.; 4 doses | IP |
| 4 | 9 | PL15-2001-C5H9v2 | 5 | 10 | b.i.w.; 4 doses | IP |
| 5 | 9 | PL15-3001-C5H9v2 | 5 | 10 | b.i.w.; 4 doses | IP |

[0660] FIG. 28A, which plots tumor volume versus number of days post initial dose, demonstrates that anti-PDL1 activatable antibodies PL15-0003-C5H9v2, PL15-2001-C5H9v2, and PL15-3001-C5H9v2 inhibited the growth of MC38 syngeneic tumors similar to positive control anti-PDL1 antibody C5H9v2.

### Example 22

### An Anti-PDL1 Activatable Antibody of the Disclosure Demonstrates Reduced PDL1 Occupancy in Blood from C57Bl/6 Mice

[0661] This example demonstrates that animals treated with anti-PDL1 activatable antibodies of the disclosure exhibited reduced binding to blood T cells from tumor bearing mice compared to that exhibited by an anti-PDL1 antibody of the disclosure.

[0662] The study was conducted in a manner similar to that described in Example 15. Briefly, mice bearing MC38 tumors between 100-200 mm³ were treated with a single dose of anti-PDL1 antibody C5H9v2 or anti-PDL1 activatable antibody PL15-0003-C5H9v2, PL15-2001-C5H9v2, or PL15-3001-C5H9v2 as indicated in Table 25, and blood was analyzed for surface bound antibody by flow cytometry four and eight days after dosing. Percent occupancy was calculated as described in Example 15.

TABLE 25
Groups and doses for PDL1 occupancy study

| | | | Dose | Dose volume | | |
|---|---|---|---|---|---|---|
| Group | Count | Treatment | (mg/kg) | (mL/kg) | Schedule | Route |
| 1 | 9 | mIgG2a (C1.18.4) | 5 | 10 | b.i.w.; 4 doses | IP |
| 2 | 9 | Anti-PD-L1 (C5H9v2) | 5 | 10 | b.i.w.; 4 doses | IP |
| 3 | 9 | Anti-PD-L1 (C5H9v2) | 3 | 10 | b.i.w.; 4 doses | IP |
| 4 | 9 | PL15-0003-C5H9v2 | 5 | 10 | b.i.w.; 4 doses | IP |
| 5 | 9 | PL15-0003-C5H9v2 | 3 | 10 | b.i.w.; 4 doses | IP |
| 6 | 9 | PL15-2001-C5H9v2 | 5 | 10 | b.i.w.; 4 doses | IP |
| 7 | 9 | PL15-2001-C5H9v2 | 3 | 10 | b.i.w.; 4 doses | IP |
| 8 | 9 | PL15-3001-C5H9v2 | 5 | 10 | b.i.w.; 4 doses | IP |
| 9 | 9 | PL15-3001-C5H9v2 | 3 | 10 | b.i.w.; 4 doses | IP |

[0663] Plasma concentrations of the antibody and activatable antibodies were determined by ELISA. FIGS. 29A to C demonstrate that the presence of tumor-derived proteases capable of cleaving the activatable antibodies did not lead to high levels of activated activatable antibodies in the blood.

### Example 23

### In Vivo Imaging of an Anti-PDL1 Activatable Antibody of the Disclosure

[0664] This Example demonstrates the ability of proteases in a tumor implanted into a mouse to activate an anti-PDL1 activatable antibody of the disclosure.

[0665] A MDA-MB-231-luc2 orthotopic xenograft breast cancer model was used for these studies. Female nu/nu mice were purchased from Charles River Laboratories to arrive at 7 week old. After 1 week acclimation, three million MDA-MD-231-luc2-4D3LN cells (Perkin Elmer) in 30 microliters (ul, also referred to herein as “μl”) serum-free RPMI (1:1 matrigel) were injected into the fourth abdominal left mammary fat pad. Tumors were grown to 110-159 mm³. Three mice per group were administered intravenously 5 mg/kg Alexa750-conjugated anti-PDL1 antibody C5H9v2 or anti-PDL1 activatable antibody PL07-2001-C5H9v2. Four mice were administered intravenously 5 mg/kg Alexa750-conjugated anti-RSV antibody control palivizumab (Synagis). Ninety-six hours after administration, optical images were collected from each of the mice. Results are shown in FIG. 30A. A high-intensity fluorescent signal was detected only in the tumors of mice dosed with the anti-PDL1 antibody or anti-PDL1 activatable antibody PL07-2001-C5H9v2, suggesting that the anti-PDL1 activatable antibody was activated and accumulated in the tumor through PDL1 binding.

### Example 24

### Activation of an Activatable Antibody of the Disclosure in Human Plasma Samples

[0666] This Example determines whether an activatable antibody of the disclosure is activated in human plasma samples.

[0667] Anti-PDL1 activatable antibody PL07-2001-C5H9v2 was conjugated with Oregon Green dye (ThermoFisher Cat#O6149). The concentration and degree of labeling was determined with a spectrophotometer. Three uM (also referred to herein as “μM”) of labeled anti-PDL1 activatable antibody PL07-2001-C5H9v2 was added into plasma samples obtained from healthy donors, patients with melanoma or lung cancer patients in a final activatable antibody to plasma ratio of 30:70. The samples were incubated for 48 hours in a 37° C. humidifying chamber. Reactions of labeled anti-PDL1 activatable antibody PL07-2001-C5H9v2 in plasma were stopped at either 0 or 48 hours by freezing samples in −80° C. or denaturing in Wes running buffer (ProteinSimple Cat #PS-MK14). Samples were analyzed by the Wes capillary western blot system (ProteinSimple) using antibodies against Oregon Green dye (ThermoFisher Cat#A-11095 at 100 μg/ml) followed by HRP conjugated secondary antibody (Jackson ImmunoResearch Cat#705-035-147 at 1/40 dilution). Analysis of percent activation of the labeled anti-PDL1 activatable antibody PL07-2001-C5H9v2 was determined using Compass (ProteinSimple) software.

[0668] There was no detectable activatable antibody activation in five normal patient samples, in five melanoma patient samples (three metastases in lymph nodes, two in the brain, and one on the skin of the back), nor in five lung cancer patient samples (one metastasis in the lower lobe of the left lung (stage IV), one in the lower lobe of the right lung (stage IV), one in the upper lobe of the left lung (stage IA), and two in the upper lobe of the right lung (stages IIIA and IB).

### OTHER EMBODIMENTS

[0669] While the invention has been described in conjunction with the detailed description thereof, the foregoing description is intended to illustrate and not limit the scope of the invention, which is defined by the scope of the appended claims. Other aspects, advantages, and modifications are within the scope of the following.

The application's sequence listing, which the Patent Office published only in electronic form, follows.

SEQUENCE LISTING (1202 sequences)

SEQ ID NO: 1 - DNA, 720 bp, Artificial Sequence
  chemically synthesized
gaggtgcagctgttggagtctgggggaggcttggtacagcctggggggtccctgagactctcctgtgcagcctctggattcacctttagcagctatgccatgagctgggtccgccaggctccagggaaggggctggagtgggtctcagatattactgcgtcgggttagaggacaacgtacgcagactccgtgaagggccggttcaccatctccagagacaattccaagaacacgctgtatctgcaaatgaacagcctgagagccgaggacacggccgtatattactgtgcgagatcgaagattgcttttgactactggggccagggaaccctggtcaccgtctcgagcggtggaggcggttcaggcggaggtggcagcggcggtggcgggtcgacggacatccagatgacccagtctccatcctccctgtctgcatctgtaggagacagagtcaccatcacttgccgggcaagtcagagcattagcagctatttaaattggtatcagcagaaaccagggaaagcccctaagctcctgatctataaggcatcccgtttgcaaagtggggtcccatcaaggttcagtggcagtggatctgggacagatttcactctcaccatcagcagtctgcaacctgaagattttgcaacttactactgtcaacagcgtgcgcttaagcctgtgacgttcggccaagggaccaaggtggaaatcaaacgg

SEQ ID NO: 2 - protein, 240 aa, Artificial Sequence
  chemically synthesized
EVQLLESGGGLVQPGGSLRLSCAASGFTFSSYAMSWVRQAPGKGLEWVSDITASGQRTTYADSVKGRFTISRDNSKNTLYLQMNSLRAEDTAVYYCARSKIAFDYWGQGTLVTVSSGGGGSGGGGSGGGGSTDIQMTQSPSSLSASVGDRVTITCRASQSISSYLNWYQQKPGKAPKLLIYKASRLQSGVPSRFSGSGSGTDFTLTISSLQPEDFATYYCQQRALKPVTFGQGTKVEIKR

SEQ ID NO: 3 - DNA, 720 bp, Artificial Sequence
  chemically synthesized
gaggtgcagctgttggagtctgggggaggcttggtacagcctggggggtccctgagactatcctgtgcagcctctggattcacctttagcagctatgccatgagctgggtccgccaggctccagggaaggggctggagtgggtctcaagtattaataaggatggtcattatacaagttacgcagactccgtgaagggccggttcaccatctccagagacaattccaagaacacgctgtatctgcaaatgaacagcctgagagccgaggacacggccgtatattactgtgcgaaaaatcttgatgagtttgactactggggccagggaaccctggtcaccgtctcgagcggtggaggcggttcaggcggaggtggcagcggcggtggcgggtcgacggacatccagatgacccagtctccatcctccctgtctgcatctgtaggagacagagtcaccatcacttgccgggcaagtcagagcattagcagctatttaaattggtatcagcagaaaccagggaaagcccctaagctcctgatctatgctgcatccagtttgcaaagtggggtcccatcaaggttcagtggcagtggatctgggacagatttcactctcaccatcagcagtctgcaacctgaagattttgcaacttactactgtcaacagagttacagtacccctaatacgttcggccaagggaccaaggtggaaatcaaacgg

SEQ ID NO: 4 - protein, 240 aa, Artificial Sequence
  chemically synthesized
EVQLLESGGGLVQPGGSLRLSCAASGFTFSSYAMSWVRQAPGKGLEWVSSINKDGHYTSYADSVKGRFTISRDNSKNTLYLQMNSLRAEDTAVYYCAKNLDEFDYWGQGTLVTVSSGGGGSGGGGSGGGGSTDIQMTQSPSSLSASVGDRVTITCRASQSISSYLNWYQQKPGKAPKLLIYAASSLQSGVPSRFSGSGSGTDFTLTISSLQPEDFATYYCQQSYSTPNTFGQGTKVEIKR

SEQ ID NO: 5 - DNA, 720 bp, Artificial Sequence
  chemically synthesized
gaggtgcagctgttggagtctgggggaggcttggtacagcctggggggtccctgagactctcctgtgcagcctctggattcacctttagcagctatgccatgagctgggtccgccaggctccagggaaggggctggagtgggtctcatctattatggctactggtgctggtacattgtacgcagactccgtgaagggccggttcaccatctccagagacaattccaagaacacgctgtatctgcaaatgaacagcctgagagccgaggacacggccgtatattactgtgcgaaagatggtgcggggtttgactactggggccagggaaccctggtcaccgtctcgagcggtggaggcggttcaggcggaggtggcagcggcggtggcgggtcgacggacatccagatgacccagtctccatcctccctgtctgcatctgtaggagacagagtcaccatcacttgccgggcaagtcagagcattagcagctatttaaattggtatcagcagaaaccagggaaagcccctaagctcctgatctattctgcatcccagttgcaaagtggggtcccatcaaggttcagtggcagtggatctgggacagatttcactctcaccatcagcagtctgcaacctgaagattttgcaacttactactgtcaacaggcgaattcgcggccttctacgttcggccaagggaccaaggtggaaatcaaacgg

SEQ ID NO: 6 - protein, 240 aa, Artificial Sequence
  chemically synthesized
EVQLLESGGGLVQPGGSLRLSCAASGFTFSSYAMSWVRQAPGKGLEWVSSIMATGAGTLYADSVKGRFTISRDNSKNTLYLQMNSLRAEDTAVYYCAKDGAGFDYWGQGTLVTVSSGGGGSGGGGSGGGGSTDIQMTQSPSSLSASVGDRVTITCRASQSISSYLNWYQQKPGKAPKLLIYSASQLQSGVPSRFSGSGSGTDFTLTISSLQPEDFATYYCQQANSRPSTFGQGTKVEIKR

SEQ ID NO: 7 - DNA, 720 bp, Artificial Sequence
  chemically synthesized
gaggtgcagctgttggagtctgggggaggcttggtacagcctggggggtccctgagactctcctgtgcagcctctggattcacctttagcagctatgccatgagctgggtccgccaggctccagggaaggggctgtagtgggtctcaactattacttcttctggtgctgctacatattacgcagactccgtgaagggccggttcaccatctccagagacaattccaagaacacgctgtatctgcaaatgaacagcctgagagccgaggacacggccgtatattactgtgcgaaaaattatactggttttgactactggggccagggaaccctggtcaccgtctcgagcggtggaggcggttcaggcggaggtggcagcggcggtggcgggtcgacggacatccagatgacccagtctccatcctccctgtctgcatctgtaggagacagagtcaccatcacttgccgggcaagtcagagcattagcagctatttaaattggtatcagcagaaaccagggaaagcccctaagctcctgatctataatgcatcctccttgcaaagtggggtcccatcaaggttcagtggcagtggatctgggacagatttcactctcaccatcagcagtctgcaacctgaagattttgcaacttactactgtcaacagtatacttatggtcctggtacgttcggccaagggaccaaggtggaaatcaaacgg

SEQ ID NO: 8 - protein, 240 aa, Artificial Sequence
  chemically synthesized
EVQLLESGGGLVQPGGSLRLSCAASGFTFSSYAMSWVRQAPGKGLQWVSTITSSGAATYYADSVKGRFTISRDNSKNTLYLQMNSLRAEDTAVYYCAKNYTGFDYWGQGTLVTVSSGGGGSGGGGSGGGGSTDIQMTQSPSSLSASVGDRVTITCRASQSISSYLNWYQQKPGKAPKLLIYNASSLQSGVPSRFSGSGSGTDFTLTISSLQPEDFATYYCQQYTYGPGTFGQGTKVEIKR

SEQ ID NO: 9 - DNA, 720 bp, Artificial Sequence
  chemically synthesized
gaggtgcagctgttggagtctgggggaggcttggtacagcctggggggtccctgagactctcctgtgcagcctctggattcacctttagcagctatgccatgagctgggtccgccaggctccagggaaggggctggagtgggtctcaagtatttattctactggtggtgctacagcttacgcagactccgtgaagggccggttcaccatctccagagacaattccaagaacacgctgtatctgcaaatgaacagcctgagagccgaggacacggccgtatattactgtgcgaaatcttctgctggttttgactactggggccagggaaccctggtcaccgtctcgagcggtggaggcggttcaggcggaggtggcagcggcggtggcgggtcgacggacatccagatgacccagtctccatcctccctgtctgcatctgtaggagacagagtcaccatcacttgccgggcaagtcagagcattagcagctatttaaattggtatcagcagaaaccagggaaagcccctaagctcctgatctattatgcatccactttgcaaagtggggtcccatcaaggttcagtggcagtggatctgggacagatttcactctcaccatcagcagtctgcaacctgaagattttgcaacttactactgtcaacaggataatggttatccttctacgttcggccaagggaccaaggtggaaatcaaacgg

SEQ ID NO: 10 - protein, 240 aa, Artificial Sequence
  chemically synthesized
EVQLLESGGGLVQPGGSLRLSCAASGFTFSSYAMSWVRQAPGKGLEWVSSIYSTGGATAYADSVKGRFTISRDNSKNTLYLQMNSLRAEDTAVYYCAKSSAGFDYWGQGTLVTVSSGGGGSGGGGSGGGGSTDIQMTQSPSSLSASVGDRVTITCRASQSISSYLNWYQQKPGKAPKLLIYYASTLQSGVPSRFSGSGSGTDFTLTISSLQPEDFATYYCQQDNGYPSTFGQGTKVEIKR

SEQ ID NO: 11 - DNA, 324 bp, Artificial Sequence
  chemically synthesized
gacatccagatgacccagtctccatcctccctgtctgcatctgtaggagacagagtcaccatcacttgccgggcaagtcagagcattagcagctatttaaattggtatcagcagaaaccagggaaagcccctaagctcctgatctattatgcatccactttgcaaagtggggtcccatcaaggttcagtggcagtggatctgggacagatttcactctcaccatcagcagtctgcaacctgaagattttgcaacttactactgtcaacaggataatggttatccttctacgttcggccaagggaccaaggtggaaatcaaacgg

SEQ ID NO: 12 - protein, 108 aa, Artificial Sequence
  chemically synthesized
DIQMTQSPSSLSASVGDRVTITCRASQSISSYLNWYQQKPGKAPKLLIYYASTLQSGVPSRFSGSGSGTDFTLTISSLQPEDFATYYCQQDNGYPSTFGQGTKVEIKR

SEQ ID NO: 13 - DNA, 360 bp, Artificial Sequence
  chemically synthesized
gaggtgcagctgttggagtctgggggaggcttggtacagcctggggggtccctgagactctcctgtgcagcctctggattcacctttagcagctatgccatgagctgggtccgccaggctccagggaaggggctggagtgggtctcaagtatttattctactggtggtgctacagcttacgcagactccgtgaagggccggttcaccatctccagagacaattccaagaacacgctgtatctgcaaatgaacagcctgagagccgaggacacggccgtatattactgtgcgaaatcttctgctggtagtcggccgggttttgactactggggccagggaaccctggtcaccgtctcgagc

SEQ ID NO: 14 - protein, 121 aa, Artificial Sequence
  chemically synthesized
EVQLLESGGGLVQPGGSLRLSCAASGFTFSSYAMSWVRQAPGKGLEWVSSIYSTGGATAYADSVKGRFTISRDNSKNTLYLQMNSLRAEDTAVYYCAKSSAGQSRPGFDYWGQGTLVTVSS

SEQ ID NO: 15 - DNA, 360 bp, Artificial Sequence
  chemically synthesized
gaggtgcagctgttggagtctgggggaggcttggtacagcctggggggtccctgagactctcctgtgcagcctctggattcacctttagcagctatgccatgagctgggtccgccaggctccagggaaggggctggagtgggtctcaagtatttattctactggtggtgctacagcttacgcagactccgtgaagggccggttcaccatctccagagacaattccaagaacacgctgtatctgcaaatgaacagcctgagagccgaggacacggccgtatattactgtgcgaaatcttctgctggttcgtggccgggttttgactactggggccagggaaccctggtcaccgtctcgagc

SEQ ID NO: 16 - protein, 121 aa, Artificial Sequence
  chemically synthesized
EVQLLESGGGLVQPGGSLRLSCAASGFTFSSYAMSWVRQAPGKGLEWVSSIYSTGGATAYADSVKGRFTISRDNSKNTLYLQMNSLRAEDTAVYYCAKSSAGQSWPGFDYWGQGTLVTVSS

SEQ ID NO: 17 - DNA, 363 bp, Artificial Sequence
  chemically synthesized
gaggtgcagctgttggagtctgggggaggcttggtacagcctggggggtccctgagactctcctgtgcagcctctggattcacctttagcagctatgccatgagctgggtccgccaggctccagggaaggggctggagtgggtctcaagtatttattctactggtggtgctacagcttacgcagactccgtgaagggccggttcaccatctccagagacaattccaagaacacgctgtatctgcaaatgaacagcctgagagccgaggacacggccgtatattactgtgcgaaatcttctgctggtcagtcgtttccgggttttgactactggggccagggaaccctggtcaccgtctcgagc

SEQ ID NO: 18 - protein, 121 aa, Artificial Sequence
  chemically synthesized
EVQLLESGGGLVQPGGSLRLSCAASGFTFSSYAMSWVRQAPGKGLEWVSSIYSTGGATAYADSVKGRFTISRDNSKNTLYLQMNSLRAEDTAVYYCAKSSAGQSFPGFDYWGQGTLVTVSS

SEQ ID NO: 19 - DNA, 348 bp, Artificial Sequence
  chemically synthesized
gaggtgcagctgttggagtctgggggaggcttggtacagcctggggggtccctgagactctcctgtgcagcctctggattcacctttagcagctatgccatgagctgggtccgccaggctccagggaaggggctggagtgggtctcaagtatttattctactggtggtgctacagcttacgcagactccgtgaagggccggttcaccatctccagagacaattccaagaacacgctgtatctgcaaatgaacagcctgagagccgaggacacggccgtatattactgtgcgaaatggtctgctgcttttgactactggggccagggaaccctggtcaccgtctcgagc

SEQ ID NO: 20 - protein, 116 aa, Artificial Sequence
  chemically synthesized
EVQLLESGGGLVQPGGSLRLSCAASGFTFSSYAMSWVRQAPGKGLEWVSSIYSTGGATAYADSVKGRFTISRDNSKNTLYLQMNSLRAEDTAVYYCAKWSAAFDYWGQGTLVTVSS

SEQ ID NO: 21 - DNA, 348 bp, Artificial Sequence; identical to SEQ ID NO: 19
  chemically synthesized

SEQ ID NO: 22 - protein, 116 aa, Artificial Sequence
  chemically synthesized
EVQLLESGGGLVQPGGSLRLSCAASGFTFSSYAMSWVRQAPGKGLEWVSSIYSTGGATAYADSVKGRFTISRDNSKNTLYLQMNSLRAEDTAVYYCAKWSAGYDYWGQGTLVTVSS

SEQ ID NO: 23 - DNA, 348 bp, Artificial Sequence
  chemically synthesized
gaggtgcagctgttggagtctgggggaggcttggtacagcctggggggtccctgagactctcctgtgcagcctctggattcacctttagcagctatgccatgagctgggtccgccaggctccagggaaggggctggagtgggtctcaagtatttattctactggtggtgctacagcttacgcagactccgtgaagggccggttcaccatctccagagacaattccaagaacacgctgtatctgcaaatgaacagcctgagagccgaggacacggccgtatattactgtgcgaaatggtctaagggttttgactactggggccagggaaccctggtcaccgtctcgagc

SEQ ID NO: 24 - protein, 116 aa, Artificial Sequence
  chemically synthesized
EVQLLESGGGLVQPGGSLRLSCAASGFTFSSYAMSWVRQAPGKGLEWVSSIYSTGGATAYADSVKGRFTISRDNSKNTLYLQMNSLRAEDTAVYYCAKWSKGFDYWGQGTLVTVSS

SEQ ID NO: 25 - DNA, 352 bp, Artificial Sequence
  chemically synthesized
gaggtgcagctgttggagtctgggggaggcttggtacagcctggggggtccctgagactctcctgtgcagcctctggattcacctttagcagctatgccatgagctgggtccgccaggctccagggaaggggctggagtgggtctcaagtatttggaagtagggtattgtgacagtgagcttacgcagactccgtgaagggccggttcaccatctccagagacaattccaagaacacgctgtatctgcaaatgaacagcctgagagccgaggacacggccgtatattactgtgcgaaatcttctgctggttttgactactggggccagggaaccctggtcaccgtctcgagc

SEQ ID NO: 26 - protein, 113 aa, Artificial Sequence
  chemically synthesized
EVQLLESGGGLVQPGGSLRLSCAASGFTFSSYAMSWVRQAPGKGLEWVSSIWKQGIVTVYDSVKGRFTISRDNSKNTLYLQMNSLRAEDTAVYYCAKSSAGFDYWGQGTLVTV

SEQ ID NO: 27 - DNA, 352 bp, Artificial Sequence
  chemically synthesized
gaggtgcagctgttggagtctgggggaggcttggtacagcctggggggtccctgagactctcctgtgcagcctctggattcacctttagcagctatgccatgagctgggtccgccaggctccagggaaggggctggagtgggtctcaagtatttggcggaatggtattgttacagttagcttacgcagactccgtgaagggccggttcaccatctccagagacaattccaagaacacgctgtatctgcaaatgaacagcctgagagccgaggacacggccgtatattactgtgcgaaatcttctgctggttttgactactggggccagggaaccctggtcaccgtctcgagc

SEQ ID NO: 28 - protein, 115 aa, Artificial Sequence
  chemically synthesized
EVQLLESGGGLVQPGGSLRLSCAASGFTFSSYAMSWVRQAPGKGLEWVSSIWRNGIVTVYDSVKGRFTISRDNSKNTLYLQMNSLRAEDTAVYYCAKSSAGFDYWGQGTLVTVSS

SEQ ID NO: 29 - DNA, 352 bp, Artificial Sequence
  chemically synthesized
gaggtgcagctgttggagtctgggggaggcttggtacagcctggggggtccctgagactctcctgtgcagcctctggattcacctttagcagctatgccatgagctgggtccgccaggctccagggaaggggctggagtgggtctcagatatttggaagtagggtatggttacagtgagcttacgcagactccgtgaagggccggttcaccatctccagagacaattccaagaacacgctgtatctgcaaatgaacagcctgagagccgaggacacggccgtatattactgtgcgaaatcttctgctggttttgactactggggccagggaaccctggtcaccgtctcgagc

SEQ ID NO: 30 - protein, 115 aa, Artificial Sequence
  chemically synthesized
EVQLLESGGGLVQPGGSLRLSCAASGFTFSSYAMSWVRQAPGKGLEWVSDIWKQGMVTVYDSVKGRFTISRDNSKNTLYLQMNSLRAEDTAVYYCAKSSAGFDYWGQGTLVTVSS

SEQ ID NO: 31 - DNA, 352 bp, Artificial Sequence
  chemically synthesized
gaggtgcagctgttggagtctgggggaggcttggtacagcctggggggtccctgagactctcctgtgcagcctctggattcacctttagcagctatgccatgagctgggtccgccaggctccagggaaggggctggagtgggtctcatcgatttggaggtagggtctggcgacagcgagcttacgcagactccgtgaagggccggttcaccatctccagagacaattccaagaacacgctgtatctgcaaatgaacagcctgagagccgaggacacggccgtatattactgtgcgaaatcttctgctggttttgactactggggccagggaaccctggtcaccgtctcgagc

SEQ ID NO: 32 - protein, 115 aa, Artificial Sequence
  chemically synthesized
EVQLLESGGGLVQPGGSLRLSCAASGFTFSSYAMSWVRQAPGKGLEWVSSIWRQGLATAYDSVKGRFTISRDNSKNTLYLQMNSLRAEDTAVYYCAKSSAGFDYWGQGTLVTVSS

SEQ ID NO: 33 - DNA, 352 bp, Artificial Sequence
  chemically synthesized
gaggtgcagctgttggagtctgggggaggcttggtacagcctggggggtccctgagactctcctgtgcagcctctggattcacctttagcagctatgccatgagctgggtccgccaggctccagggaaggggctggagtgggtctcagagattgtggctactggtattttgacaagtagcttacgcagactccgtgaagggccggttcaccatctccagagacaattccaagaacacgctgtatctgcaaatgaacagcctgagagccgaggacacggccgtatattactgtgcgaaatcttctgctggttttgactactggggccagggaaccctggtcaccgtctcgagc

SEQ ID NO: 34 - protein, 115 aa, Artificial Sequence
  chemically synthesized
EVQLLESGGGLVQPGGSLRLSCAASGFTFSSYAMSWVRQAPGKGLEWVSEIVATGILTSYDSVKGRFTISRDNSKNTLYLQMNSLRAEDTAVYYCAKSSAGFDYWGQGTLVTVSS

SEQ ID NO: 35 - DNA, 352 bp, Artificial Sequence
  chemically synthesized
gaggtgcagctgttggagtctgggggaggcttggtacagcctggggggtccctgagactctcctgtgcagcctctggattcacctttagcagctatgccatgagctgggtccgccaggctccagggaaggggctggagtgggtctcatcgattggtcggtagggtttgattacagttagcttacgcagactccgtgaagggccggttcaccatctccagagacaattccaagaacacgctgtatctgcaaatgaacagcctgagagccgaggacacggccgtatattactgtgcgaaatcttctgctggttttgactactggggccagggaaccctggtcaccgtctcgagc

SEQ ID NO: 36 - protein, 115 aa, Artificial Sequence
  chemically synthesized
EVQLLESGGGLVQPGGSLRLSCAASGFTFSSYAMSWVRQAPGKGLEWVSSIGRQGLITVYDSVKGRFTISRDNSKNTLYLQMNSLRAEDTAVYYCAKSSAGFDYWGQGTLVTVSS

SEQ ID NO: 37 - DNA, 352 bp, Artificial Sequence
  chemically synthesized
gaggtgcagctgttggagtctgggggaggcttggtacagcctggggggtccctgagactctcctgtgcagcctctggattcacctttagcagctatgccatgagctgggtccgccaggctccagggaaggggctggagtgggtctcatctatttggtattagggtctggtgacagttagcttacgcagactccgtgaagggccggttcaccatctccagagacaattccaagaacacgctgtatctgcaaatgaacagcctgagagccgaggacacggccgtatattactgtgcgaaatcttctgctggttttgactactggggccagggaaccctggtcaccgtctcgagc

SEQ ID NO: 38 - protein, 115 aa, Artificial Sequence
  chemically synthesized
EVQLLESGGGLVQPGGSLRLSCAASGFTFSSYAMSWVRQAPGKGLEWVSSIWYQGLVTVYDSVKGRFTISRDNSKNTLYLQMNSLRAEDTAVYYCAKSSAGFDYWGQGTLVTVSS

SEQ ID NO: 39 - DNA, 352 bp, Artificial Sequence
  chemically synthesized
gaggtgcagctgttggagtctgggggaggcttggtacagcctggggggtccctgagactctcctgtgcagcctctggattcacctttagcagctatgccatgagctgggtccgccaggctccagggaaggggctggagtgggtctcagatatttggaagtagggttttgctacagcgagcttacgcagactccgtgaagggccggttcaccatctccagagacaattccaagaacacgctgtatctgcaaatgaacagcctgagagccgaggacacggccgtatattactgtgcgaaatcttctgctggttttgactactggggccagggaaccctggtcaccgtctcgagc

SEQ ID NO: 40 - protein, 114 aa, Artificial Sequence
  chemically synthesized
EVQLLESGGGLVQPGGSLRLSCAASGFTFSSYAMSWVRQAPGKGLEWVSDIWKQGFATADSVKGRFTISRDNSKNTLYLQMNSLRAEDTAVYYCAKSSAGFDYWGQGTLVTVSS

SEQ ID NO: 41 - DNA, 352 bp, Artificial Sequence; identical to SEQ ID NO: 25
  chemically synthesized

SEQ ID NO: 42 - protein, 115 aa, Artificial Sequence
  chemically synthesized
EVQLLESGGGLVQPGGSLRLSCAASGFTFSSYAMSWVRQAPGKGLEWVSSIWKQGIVTVYDSVKGRFTISRDNSKNTLYLQMNSLRAEDTAVYYCAKSSAGFDYWGQGTLVTVSS

SEQ ID NO: 43 - DNA, 352 bp, Artificial Sequence; identical to SEQ ID NO: 31
  chemically synthesized

SEQ ID NO: 44 - protein, 115 aa, Artificial Sequence; identical to SEQ ID NO: 32
  chemically synthesized

SEQ ID NO: 45 - DNA, 348 bp, Artificial Sequence
  chemically synthesized
gaggtgcagctgttggagtctgggggaggcttggtacagcctggggggtccctgagactctcctgtgcagcctctggattcacctttagcagctatgccatgagctgggtccgccaggctccagggaaggggctggagtgggtctcaagtatttggcggaatggtattgttacagtttacgcagactccgtgaagggccggttcaccatctccagagacaattccaagaacacgctgtatctgcaaatgaacagcctgagagccgaggacacggccgtatattactgtgcgaaatggtctgctgcttttgactactggggccagggaaccctggtcaccgtctcgagc

SEQ ID NO: 46 - protein, 116 aa, Artificial Sequence
  chemically synthesized
EVQLLESGGGLVQPGGSLRLSCAASGFTFSSYAMSWVRQAPGKGLEWVSSIWRNGIVTVYADSVKGRFTISRDNSKNTLYLQMNSLRAEDTAVYYCAKWSAAFDYWGQGTLVTVSS

SEQ ID NO: 47 - DNA, 348 bp, Artificial Sequence
  chemically synthesized
gaggtgcagctgttggagtctgggggaggcttggtacagcctggggggtccctgagactctcctgtgcagcctctggattcacctttagcagctatgccatgagctgggtccgccaggctccagggaaggggctggagtgggtctcaagtatttggcggaatggtattgttacagtttacgcagactccgtgaagggccggttcaccatctccagagacaattccaagaacacgctgtatctgcaaatgaacagcctgagagccgaggacacggccgtatattactgtgcgaaatggtctgctggttatgactactggggccagggaaccctggtcaccgtctcgagc

SEQ ID NO: 48 - protein, 116 aa, Artificial Sequence
  chemically synthesized
EVQLLESGGGLVQPGGSLRLSCAASGFTFSSYAMSWVRQAPGKGLEWVSSIWRNGIVTVYADSVKGRFTISRDNSKNTLYLQMNSLRAEDTAVYYCAKWSAGYDYWGQGTLVTVSS

SEQ ID NO: 49 - DNA, 348 bp, Artificial Sequence
  chemically synthesized
gaggtgcagctgttggagtctgggggaggcttggtacagcctggggggtccctgagactctcctgtgcagcctctggattcacctttagcagctatgccatgagctgggtccgccaggctccagggaaggggctggagtgggtctcaagtatttggcggaatggtattgttacagtttacgcagactccgtgaagggccggttcaccatctccagagacaattccaagaacacgctgtatctgcaaatgaacagcctgagagccgaggacacggccgtatattactgtgcgaaatggtctaagggttttgactactggggccagggaaccctggtcaccgtctcgagc

SEQ ID NO: 50 - protein, 116 aa, Artificial Sequence
  chemically synthesized
EVQLLESGGGLVQPGGSLRLSCAASGFTFSSYAMSWVRQAPGKGLEWVSSIWRNGIVTVYADSVKGRFTISRDNSKNTLYLQMNSLRAEDTAVYYCAKWSKGFDYWGQGTLVTVSS

SEQ ID NO: 51 - DNA, 348 bp, Artificial Sequence
  chemically synthesized
gaggtgcagctgttggagtctgggggaggcttggtacagcctggggggtccctgagactctcctgtgcagcctctggattcacctttagcagctatgccatgagctgggtccgccaggctccagggaaggggctggagtgggtctcatctatttggtatcagggtctggtgacagtttacgcagactccgtgaagggccggttcaccatctccagagacaattccaagaacacgctgtatctgcaaatgaacagcctgagagccgaggacacggccgtatattactgtgcgaaatggtctgctgcttttgactactggggccagggaaccctggtcaccgtctcgagc

SEQ ID NO: 52 - protein, 120 aa, Artificial Sequence
  chemically synthesized
EVQLLESGGGLVQPGGSLRLSCAASGFTFSSYAMETSWVRQAPGKGLEWVSSIWYQGLVTVYADSVKGRFTISRDNSKNTLYLQMETNSLRAEDTAVYYCAKWSAAFDYWGQGTLVTVSS

SEQ ID NO: 53 - DNA, 348 bp, Artificial Sequence; identical to SEQ ID NO: 47
  chemically synthesized

SEQ ID NO: 54 - protein, 116 aa, Artificial Sequence
  chemically synthesized
EVQLLESGGGLVQPGGSLRLSCAASGFTFSSYAMSWVRQAPGKGLEWVSSIWYQGLVTVYADSVKGRFTISRDNSKNTLYLQMNSLRAEDTAVYYCAKWSAGYDYWGQGTLVTVSS

SEQ ID NO: 55 - DNA, 348 bp, Artificial Sequence; identical to SEQ ID NO: 49
  chemically synthesized

SEQ ID NO: 56 - protein, 116 aa, Artificial Sequence
  chemically synthesized
EVQLLESGGGLVQPGGSLRLSCAASGFTFSSYAMSWVRQAPGKGLEWVSSIWYQGLVTVYADSVKGRFTISRDNSKNTLYLQMNSLRAEDTAVYYCAKWSKGFDYWGQGTLVTVSS

SEQ ID NO: 57 - DNA, 324 bp, Artificial Sequence
  chemically synthesized
gatattcagatgacccagagcccgagcagcctgagcgcgagcgtgggcgatcgcgtgaccattacctgccgcgcgagccagagcattagcagctatctgaactggtatcagcagaaaccgggcaaagcgccgaaactgctgatttatgcggcgagcagcctgcagagcggcgtgccgagccgctttagcggcagcggcagcggcaccgattttaccctgaccattagcagcctgcagccggaagattttgcgacctattattgccagcaggataacggctatccgagcacctttggcggcggcaccaaagtggaaattaaacgc

SEQ ID NO: 58 - protein, 108 aa, Artificial Sequence
  chemically synthesized
DIQMTQSPSSLSASVGDRVTITCRASQSISSYLNWYQQKPGKAPKLLIYAASSLQSGVPSRFSGSGSGTDFTLTISSLQPEDFATYYCQQDNGYPSTFGGGTKVEIKR

SEQ ID NO: 59 - protein, 15 aa, Artificial Sequence
  chemically synthesized
LCEVLMLLQHPWCMG

SEQ ID NO: 60 - protein, 15 aa, Artificial Sequence
  chemically synthesized
IACRHFMEQLPFCHH

SEQ ID NO: 61 - protein, 15 aa, Artificial Sequence
  chemically synthesized
FGPRCGEASTCVPYE

SEQ ID NO: 62 - protein, 15 aa, Artificial Sequence
  chemically synthesized
ILYCDSWGAGCLTRP

SEQ ID NO: 63 - protein, 15 aa, Artificial Sequence
  chemically synthesized
GIALCPSHFCQLPQT

SEQ ID NO: 64 - protein, 15 aa, Artificial Sequence
  chemically synthesized
DGPRCFVSGECSPIG

SEQ ID NO: 65 - protein, 15 aa, Artificial Sequence
  chemically synthesized
LCYKLDYDDRSYCHI

SEQ ID NO: 66 - protein, 15 aa, Artificial Sequence
  chemically synthesized
PCHPHPYDARPYCNV

SEQ ID NO: 67 - protein, 15 aa, Artificial Sequence
  chemically synthesized
PCYWHPFFAYRYCNT

SEQ ID NO: 68 - protein, 15 aa, Artificial Sequence
  chemically synthesized
VCYYMDWLGRNWCSS

SEQ ID NO: 69 - protein, 15 aa, Artificial Sequence
  chemically synthesized
LCDLFKLREFPYCMG

SEQ ID NO: 70 - protein, 15 aa, Artificial Sequence
  chemically synthesized
YLPCHFVPIGACNNK

SEQ ID NO: 71 - protein, 15 aa, Artificial Sequence
  chemically synthesized
IFCHMGVVVPQCANY

SEQ ID NO: 72 - protein, 15 aa, Artificial Sequence
  chemically synthesized
ACHPHPYDARPYCNV

SEQ ID NO: 73 - protein, 15 aa, Artificial Sequence
  chemically synthesized
PCHPAPYDARPYCNV

SEQ ID NO: 74 - protein, 15 aa, Artificial Sequence
  chemically synthesized
PCHPHAYDARPYCNV

SEQ ID NO: 75 - protein, 15 aa, Artificial Sequence
  chemically synthesized
PCHPHPADARPYCNV

SEQ ID NO: 76 - protein, 15 aa, Artificial Sequence
  chemically synthesized
PCHPHPYAARPYCNV

SEQ ID NO: 77 - protein, 15 aa, Artificial Sequence
  chemically synthesized
PCHPHPYDAAPYCNV

SEQ ID NO: 78 - protein, 15 aa, Artificial Sequence
  chemically synthesized
PCHPHPYDARPACNV

SEQ ID NO: 79 - protein, 15 aa, Artificial Sequence
  chemically synthesized
PCHPHPYDARPYCAV

SEQ ID NO: 80 - protein, 15 aa, Artificial Sequence
  chemically synthesized
PCHAHPYDARPYCNV

SEQ ID NO: 81 - protein, 15 aa, Artificial Sequence
  chemically synthesized
PCHPHPYDARAYCNV

SEQ ID NO: 82 - DNA, 534 bp, Artificial Sequence
  chemically synthesized
caaggtcagtctggatcctattgcgaggttagtgagctgtttgttcttccttggtgcatgggtggaggtggctcgagcggtggcagcggtggctctggtggtactagcacctctggtcgttccgctaacccacgtggcggcggttctgacatccagatgacccagagccccagcagcctgtctgctagcgtgggcgacagagtgaccatcacctgtagagccagccagagcatcagcagctacctgaactggtatcagcagaagcccggcaaggcccccaaactgctgatctacgccgccagctctctgcagtctggcgtgcccagcagattttccggcagcggctctggcaccgacttcaccctgaccatcagctccctgcagcccgaggacttcgccacctactactgccagcaggacaacggctaccccagcacctttggcggaggtaccaaggtggaaatcaagcgttgtgaggccactcacaagacatcaacttcacccattgtcaagagcttcaacaggaatgagtgt

SEQ ID NO: 83 - protein, 157 aa, Artificial Sequence
  chemically synthesized
QGQSGSYCEVSELFVLPWCMGGGGSSGGSGGSGGTSTSGRSANPRGGGSDIQMTQSPSSLSASVGDRVTITCRASQSISSYLNWYQQKPGKAPKLLIYAASSLQSGVPSRFSGSGSGTDFTLTISSLQPEDFATYYCQQDNGYPSTFGGGTKVEIKR

SEQ ID NO: 84 - DNA, 534 bp, Artificial Sequence
  chemically synthesized
caaggtcagtctggatcctcttgccttatgcatccgcattatgctcatgattattgctatgttggaggtggctcgagcggtggcagcggtggctctggtggtactagcacctctggtcgttccgctaacccacgtggcggcggttctgacatccagatgacccagagccccagcagcctgtctgctagcgtgggcgacagagtgaccatcacctgtagagccagccagagcatcagcagctacctgaactggtatcagcagaagcccggcaaggcccccaaactgctgatctacgccgccagctctctgcagtctggcgtgcccagcagattttccggcagcggctctggcaccgacttcaccctgaccatcagctccctgcagcccgaggacttcgccacctactactgccagcaggacaacggctaccccagcacctttggcggaggtaccaaggtggaaatcaagcgttgtgaggccactcacaagacatcaacttcacccattgtcaagagcttcaacaggaatgagtgt

SEQ ID NO: 85 - protein, 157 aa, Artificial Sequence
  chemically synthesized
QGQSGSSCLMHPHYAHDYCYVGGGSSGGSGGSGGTSTSGRSANPRGGGSDIQMTQSPSSLSASVGDRVTITCRASQSISSYLNWYQQKPGKAPKLLIYAASSLQSGVPSRFSGSGSGTDFTLTISSLQPEDFATYYCQQDNGYPSTFGGGTKVEIKR

SEQ ID NO: 86 - DNA, 534 bp, Artificial Sequence
  chemically synthesized
caaggtcagtctggatccttgtgcgaggttttgatgttgttgcagcatccgtggtgcatggggggaggtggctcgagcggtggcagcggtggctctggtggtactagcacctctggtcgttccgctaacccacgtggcggcggttctgacatccagatgacccagagccccagcagcctgtctgctagcgtgggcgacagagtgaccatcacctgtagagccagccagagcatcagcagctacctgaactggtatcagcagaagcccggcaaggcccccaaactgctgatctacgccgccagctctctgcagtctggcgtgcccagcagattttccggcagcggctctggcaccgacttcaccctgaccatcagctccctgcagcccgaggacttcgccacctactactgccagcaggacaacggctaccccagcacctttggcggaggtaccaaggtggaaatcaagcgttgtgaggccactcacaagacatcaacttcacccattgtcaagagcttcaacaggaatgagtgt

SEQ ID NO: 87 - protein, 157 aa, Artificial Sequence
  chemically synthesized
QGQSGSLCEVLMLLQHPWCMGGGGSSGGSGGSGGTSTSGRSANPRGGGSDIQMTQSPSSLSASVGDRVTITCRASQSISSYLNWYQQKPGKAPKLLIYAASSLQSGVPSRFSGSGSGTDFTLTISSLQPEDFATYYCQQDNGYPSTFGGGTKVEIKR

SEQ ID NO: 88 - DNA, 534 bp, Artificial Sequence
  chemically synthesized
caaggtcagtctggatccattgcgtgccggcattttatggagcagttgccgttttgccatcatggaggtggctcgagcggtggcagcggtggctctggtggtactagcacctctggtcgttccgctaacccacgtggcggcggttctgacatccagatgacccagagccccagcagcctgtctgctagcgtgggcgacagagtgaccatcacctgtagagccagccagagcatcagcagctacctgaactggtatcagcagaagcccggcaaggcccccaaactgctgatctacgccgccagctctctgcagtctggcgtgcccagcagattttccggcagcggctctggcaccgacttcaccctgaccatcagctccctgcagcccgaggacttcgccacctactactgccagcaggacaacggctaccccagcacctttggcggaggtaccaaggtggaaatcaagcgttgtgaggccactcacaagacatcaacttcacccattgtcaagagcttcaacaggaatgagtgt

SEQ ID NO: 89 - protein, 157 aa, Artificial Sequence
  chemically synthesized
QGQSGSIACRHFMEQLPFCHHGGGSSGGSGGSGGTSTSGRSANPRGGGSDIQMTQSPSSLSASVGDRVTITCRASQSISSYLNWYQQKPGKAPKLLIYAASSLQSGVPSRFSGSGSGTDFTLTISSLQPEDFATYYCQQDNGYPSTFGGGTKVEIKR

SEQ ID NO: 90 - DNA, 534 bp, Artificial Sequence
  chemically synthesized
caaggtcagtctggatcctttggtcctaggtgcggtgaggcttctacttgcgttccgtatgagggaggtggctcgagcggtggcagcggtggctctggtggtactagcacctctggtcgttccgctaacccacgtggcggcggttctgacatccagatgacccagagccccagcagcctgtctgctagcgtgggcgacagagtgaccatcacctgtagagccagccagagcatcagcagctacctgaactggtatcagcagaagcccggcaaggcccccaaactgctgatctacgccgccagctctctgcagtctggcgtgcccagcagattttccggcagcggctctggcaccgacttcaccctgaccatcagctccctgcagcccgaggacttcgccacctactactgccagcaggacaacggctaccccagcacctttggcggaggtaccaaggtggaaatcaagcgttgtgaggccactcacaagacatcaacttcacccattgtcaagagcttcaacaggaatgagtgt

SEQ ID NO: 91 - protein, 157 aa, Artificial Sequence
  chemically synthesized
QGQSGSFGPRCGEASTCVPYEGGGSSGGSGGSGGTSTSGRSANPRGGGSDIQMTQSPSSLSASVGDRVTITCRASQSISSYLNWYQQKPGKAPKLLIYAASSLQSGVPSRFSGSGSGTDFTLTISSLQPEDFATYYCQQDNGYPSTFGGGTKVEIKR

SEQ ID NO: 92 - DNA, 534 bp, Artificial Sequence
  chemically synthesized
caaggtcagtctggatccattctttattgcgatagttggggggcggggtgcttgacgcggccgggaggtggctcgagcggtggcagcggtggctctggtggtactagcacctctggtcgttccgctaacccacgtggcggcggttctgacatccagatgacccagagccccagcagcctgtctgctagcgtgggcgacagagtgaccatcacctgtagagccagccagagcatcagcagctacctgaactggtatcagcagaagcccggcaaggcccccaaactgctgatctacgccgccagctctctgcagtctggcgtgcccagcagattttccggcagcggctctggcaccgacttcaccctgaccatcagctccctgcagcccgaggacttcgccacctactactgccagcaggacaacggctaccccagcacctttggcggaggtaccaaggtggaaatcaagcgttgtgaggccactcacaagacatcaacttcacccattgtcaagagcttcaacaggaatgagtgt

SEQ ID NO: 93 - protein, 157 aa, Artificial Sequence
  chemically synthesized
QGQSGSILYCDSWGAGCLTRPGGGSSGGSGGSGGTSTSGRSANPRGGGSDIQMTQSPSSLSASVGDRVTITCRASQSISSYLNWYQQKPGKAPKLLIYAASSLQSGVPSRFSGSGSGTDFTLTISSLQPEDFATYYCQQDNGYPSTFGGGTKVEIKR

SEQ ID NO: 94 - DNA, 534 bp, Artificial Sequence
  chemically synthesized
caaggtcagtctggatccgggattgcgttgtgcccgtctcatttttgccagctgcctcagactggaggtggctcgagcggtggcagcggtggctctggtggtactagcacctctggtcgttccgctaacccacgtggcggcggttctgacatccagatgacccagagccccagcagcctgtctgctagcgtgggcgacagagtgaccatcacctgtagagccagccagagcatcagcagctacctgaactggtatcagcagaagcccggcaaggcccccaaactgctgatctacgccgccagctctctgcagtctggcgtgcccagcagattttccggcagcggctctggcaccgacttcaccctgaccatcagctccctgcagcccgaggacttcgccacctactactgccagcaggacaacggctaccccagcacctttggcggaggtaccaaggtggaaatcaagcgttgtgaggccactcacaagacatcaacttcacccattgtcaagagcttcaacaggaatgagtgt

SEQ ID NO: 95 - protein, 157 aa, Artificial Sequence
  chemically synthesized
QGQSGSGIALCPSHFCQLPQTGGGSSGGSGGSGGTSTSGRSANPRGGGSDIQMTQSPSSLSASVGDRVTITCRASQSISSYLNWYQQKPGKAPKLLIYAASSLQSGVPSRFSGSGSGTDFTLTISSLQPEDFATYYCQQDNGYPSTFGGGTKVEIKR

SEQ ID NO: 96 - DNA, 534 bp, Artificial Sequence
  chemically synthesized
caaggtcagtctggatccgatgggccgcgttgctttgtgtcgggggagtgctctccgattggtggaggtggctcgagcggtggcagcggtggctctggtggtactagcacctctggtcgttccgctaacccacgtggcggcggttctgacatccagatgacccagagccccagcagcctgtctgctagcgtgggcgacagagtgaccatcacctgtagagccagccagagcatcagcagctacctgaactggtatcagcagaagcccggcaaggcccccaaactgctgatctacgccgccagctctctgcagtctggcgtgcccagcagattttccggcagcggctctggcaccgacttcaccctgaccatcagctccctgcagcccgaggacttcgccacctactactgccagcaggacaacggctaccccagcacctttggcggaggtaccaaggtggaaatcaagcgttgtgaggccactcacaagacatcaacttcacccattgtcaagagcttcaacaggaatgagtgt

SEQ ID NO: 97 - protein, 157 aa, Artificial Sequence
  chemically synthesized
QGQSGSDGPRCFVSGECSPIGGGGSSGGSGGSGGTSTSGRSANPRGGGSDIQMTQSPSSLSASVGDRVTITCRASQSISSYLNWYQQKPGKAPKLLIYAASSLQSGVPSRFSGSGSGTDFTLTISSLQPEDFATYYCQQDNGYPSTFGGGTKVEIKR

SEQ ID NO: 98 - DNA, 534 bp, Artificial Sequence
  chemically synthesized
caaggtcagtctggatccttgtgctataagctggattatgatgataggtcttattgccatattggaggtggctcgagcggtggcagcggtggctctggtggtactagcacctctggtcgttccgctaacccacgtggcggcggttctgacatccagatgacccagagccccagcagcctgtctgctagcgtgggcgacagagtgaccatcacctgtagagccagccagagcatcagcagctacctgaactggtatcagcagaagcccggcaaggcccccaaactgctgatctacgccgccagctctctgcagtctggcgtgcccagcagattttccggcagcggctctggcaccgacttcaccctgaccatcagctccctgcagcccgaggacttcgccacctactactgccagcaggacaacggctaccccagcacctttggcggaggtaccaaggtggaaatcaagcgttgtgaggccactcacaagacatcaacttcacccattgtcaagagcttcaacaggaatgagtgt

SEQ ID NO: 99 - protein, 157 aa, Artificial Sequence
  chemically synthesized
QGQSGSLCYKLDYDDRSYCHIGGGSSGGSGGSGGTSTSGRSANPRGGGSDIQMTQSPSSLSASVGDRVTITCRASQSISSYLNWYQQKPGKAPKLLIYAASSLQSGVPSRFSGSGSGTDFTLTISSLQPEDFATYYCQQDNGYPSTFGGGTKVEIKR

SEQ ID NO: 100 - DNA, 534 bp, Artificial Sequence
  chemically synthesized
caaggtcagtctggatccccgtgccatccgcatccttatgatgctcgtccttattgcaatgtgggaggtggctcgagcggtggcagcggtggctctggtggtactagcacctctggtcgttccgctaacccacgtggcggcggttctgacatccagatgacccagagccccagcagcctgtctgctagcgtgggcgacagagtgaccatcacctgtagagccagccagagcatcagcagctacctgaactggtatcagcagaagcccggcaaggcccccaaactgctgatctacgccgccagctctctgcagtctggcgtgcccagcagattttccggcagcggctctggcaccgacttcaccctgaccatcagctccctgcagcccgaggacttcgccacctactactgccagcaggacaacggctaccccagcacctttggcggaggtaccaaggtggaaatcaagcgttgtgaggccactcacaagacatcaacttcacccattgtcaagagcttcaacaggaatgagtgt

SEQ ID NO: 101 - protein, 157 aa, Artificial Sequence
  chemically synthesized
QGQSGSPCHPHPYDARPYCNVGGGSSGGSGGSGGTSTSGRSANPRGGGSDIQMTQSPSSLSASVGDRVTITCRASQSISSYLNWYQQKPGKAPKLLIYAASSLQSGVPSRFSGSGSGTDFTLTISSLQPEDFATYYCQQDNGYPSTFGGGTKVEIKR

SEQ ID NO: 102 - DNA, 534 bp, Artificial Sequence
  chemically synthesized
caaggtcagtctggatccccttgctattggcatcctttttttgcgtataggtattgcaatactggaggtggctcgagcggtggcagcggtggctctggtggtactagcacctctggtcgttccgctaacccacgtggcggcggttctgacatccagatgacccagagccccagcagcctgtctgctagcgtgggcgacagagtgaccatcacctgtagagccagccagagcatcagcagctacctgaactggtatcagcagaagcccggcaaggcccccaaactgctgatctacgccgccagctctctgcagtctggcgtgcccagcagattttccggcagcggctctggcaccgacttcaccctgaccatcagctccctgcagcccgaggacttcgccacctactactgccagcaggacaacggctaccccagcacctttggcggaggtaccaaggtggaaatcaagcgttgtgaggccactcacaagacatcaacttcacccattgtcaagagcttcaacaggaatgagtgt

SEQ ID NO: 103 - protein, 157 aa, Artificial Sequence
  chemically synthesized
QGQSGSPCYWHPFFAYRYCNTGGGSSGGSGGSGGTSTSGRSANPRGGGSDIQMTQSPSSLSASVGDRVTITCRASQSISSYLNWYQQKPGKAPKLLIYAASSLQSGVPSRFSGSGSGTDFTLTISSLQPEDFATYYCQQDNGYPSTFGGGTKVEIKR

SEQ ID NO: 104 - DNA, 534 bp, Artificial Sequence
  chemically synthesized
caaggtcagtctggatccgtttgctattatatggattggttggggcggaattggtgctcttcgggaggtggctcgagcggtggcagcggtggctctggtggtactagcacctctggtcgttccgctaacccacgtggcggcggttctgacatccagatgacccagagccccagcagcctgtctgctagcgtgggcgacagagtgaccatcacctgtagagccagccagagcatcagcagctacctgaactggtatcagcagaagcccggcaaggcccccaaactgctgatctacgccgccagctctctgcagtctggcgtgcccagcagattttccggcagcggctctggcaccgacttcaccctgaccatcagctccctgcagcccgaggacttcgccacctactactgccagcaggacaacggctaccccagcacctttggcggaggtaccaaggtggaaatcaagcgttgtgaggccactcacaagacatcaacttcacccattgtcaagagcttcaacaggaatgagtgt

SEQ ID NO: 105 - protein, 157 aa, Artificial Sequence
  chemically synthesized
QGQSGSVCYYMDWLGRNWCSSGGGSSGGSGGSGGTSTSGRSANPRGGGSDIQMTQSPSSLSASVGDRVTITCRASQSISSYLNWYQQKPGKAPKLLIYAASSLQSGVPSRFSGSGSGTDFTLTISSLQPEDFATYYCQQDNGYPSTFGGGTKVEIKR

SEQ ID NO: 106 - DNA, 534 bp, Artificial Sequence
  chemically synthesized
caaggtcagtctggatccctgtgcgatctgtttaagttgcgtgagtttccttattgcatggggggaggtggctcgagcggtggcagcggtggctctggtggtactagcacctctggtcgttccgctaacccacgtggcggcggttctgacatccagatgacccagagccccagcagcctgtctgctagcgtgggcgacagagtgaccatcacctgtagagccagccagagcatcagcagctacctgaactggtatcagcagaagcccggcaaggcccccaaactgctgatctacgccgccagctctctgcagtctggcgtgcccagcagattttccggcagcggctctggcaccgacttcaccctgaccatcagctccctgcagcccgaggacttcgccacctactactgccagcaggacaacggctaccccagcacctttggcggaggtaccaaggtggaaatcaagcgttgtgaggccactcacaagacatcaacttcacccattgtcaagagcttcaacaggaatgagtgt

SEQ ID NO: 107 - protein, 157 aa, Artificial Sequence
  chemically synthesized
QGQSGSLCDLFKLREFPYCMGGGGSSGGSGGSGGTSTSGRSANPRGGGSDIQMTQSPSSLSASVGDRVTITCRASQSISSYLNWYQQKPGKAPKLLIYAASSLQSGVPSRFSGSGSGTDFTLTISSLQPEDFATYYCQQDNGYPSTFGGGTKVEIKR

SEQ ID NO: 108 - DNA, 534 bp, Artificial Sequence
  chemically synthesized
caaggtcagtctggatcctatcttccgtgccattttgttccgattggggcttgcaataataagggaggtggctcgagcggtggcagcggtggctctggtggtactagcacctctggtcgttccgctaacccacgtggcggcggttctgacatccagatgacccagagccccagcagcctgtctgctagcgtgggcgacagagtgaccatcacctgtagagccagccagagcatcagcagctacctgaactggtatcagcagaagcccggcaaggcccccaaactgctgatctacgccgccagctctctgcagtctggcgtgcccagcagattttccggcagcggctctggcaccgacttcaccctgaccatcagctccctgcagcccgaggacttcgccacctactactgccagcaggacaacggctaccccagcacctttggcggaggtaccaaggtggaaatcaagcgttgtgaggccactcacaagacatcaacttcacccattgtcaagagcttcaacaggaatgagtgt

SEQ ID NO: 109 - protein, 157 aa, Artificial Sequence
  chemically synthesized
QGQSGSYLPCHFVPIGACNNKGGGSSGGSGGSGGTSTSGRSANPRGGGSDIQMTQSPSSLSASVGDRVTITCRASQSISSYLNWYQQKPGKAPKLLIYAASSLQSGVPSRFSGSGSGTDFTLTISSLQPEDFATYYCQQDNGYPSTFGGGTKVEIKR

SEQ ID NO: 110 - DNA, 534 bp, Artificial Sequence
  chemically synthesized
caaggtcagtctggatccattttttgccatatgggtgttgtggttcctcagtgcgcgaattatggaggtggctcgagcggtggcagcggtggctctggtggtactagcacctctggtcgttccgctaacccacgtggcggcggttctgacatccagatgacccagagccccagcagcctgtctgctagcgtgggcgacagagtgaccatcacctgtagagccagccagagcatcagcagctacctgaactggtatcagcagaagcccggcaaggcccccaaactgctgatctacgccgccagctctctgcagtctggcgtgcccagcagattttccggcagcggctctggcaccgacttcaccctgaccatcagctccctgcagcccgaggacttcgccacctactactgccagcaggacaacggctaccccagcacctttggcggaggtaccaaggtggaaatcaagcgttgtgaggccactcacaagacatcaacttcacccattgtcaagagcttcaacaggaatgagtgt

SEQ ID NO: 111 - protein, 157 aa, Artificial Sequence
  chemically synthesized
QGQSGSIFCHMGVVVPQCANYGGGSSGGSGGSGGTSTSGRSANPRGGGSDIQMTQSPSSLSASVGDRVTITCRASQSISSYLNWYQQKPGKAPKLLIYAASSLQSGVPSRFSGSGSGTDFTLTISSLQPEDFATYYCQQDNGYPSTFGGGTKVEIKR

SEQ ID NO: 112 - DNA, 534 bp, Artificial Sequence
  chemically synthesized
caaggtcagtctggatccgcgtgccatccgcatccttatgatgctcgtccttattgcaatgtgggaggtggctcgagcggtggcagcggtggctctggtggtactagcacctctggtcgttccgctaacccacgtggcggcggttctgacatccagatgacccagagccccagcagcctgtctgctagcgtgggcgacagagtgaccatcacctgtagagccagccagagcatcagcagctacctgaactggtatcagcagaagcccggcaaggcccccaaactgctgatctacgccgccagctctctgcagtctggcgtgcccagcagattttccggcagcggctctggcaccgacttcaccctgaccatcagctccctgcagcccgaggacttcgccacctactactgccagcaggacaacggctaccccagcacctttggcggaggtaccaaggtggaaatcaagcgttgtgaggccactcacaagacatcaacttcacccattgtcaagagcttcaacaggaatgagtgt

SEQ ID NO: 113 - protein, 157 aa, Artificial Sequence
  chemically synthesized
QGQSGSACHPHPYDARPYCNVGGGSSGGSGGSGGTSTSGRSANPRGGGSDIQMTQSPSSLSASVGDRVTITCRASQSISSYLNWYQQKPGKAPKLLIYAASSLQSGVPSRFSGSGSGTDFTLTISSLQPEDFATYYCQQDNGYPSTFGGGTKVEIKR

SEQ ID NO: 114 - DNA, 534 bp, Artificial Sequence
  chemically synthesized
caaggtcagtctggatccccgtgccatccggctccttatgatgctcgtccttattgcaatgtgggaggtggctcgagcggtggcagcggtggctctggtggtactagcacctctggtcgttccgctaacccacgtggcggcggttctgacatccagatgacccagagccccagcagcctgtctgctagcgtgggcgacagagtgaccatcacctgtagagccagccagagcatcagcagctacctgaactggtatcagcagaagcccggcaaggcccccaaactgctgatctacgccgccagctctctgcagtctggcgtgcccagcagattttccggcagcggctctggcaccgacttcaccctgaccatcagctccctgcagcccgaggacttcgccacctactactgccagcaggacaacggctaccccagcacctttggcggaggtaccaaggtggaaatcaagcgttgtgaggccactcacaagacatcaacttcacccattgtcaagagcttcaacaggaatgagtgt

SEQ ID NO: 115 - protein, 157 aa, Artificial Sequence
  chemically synthesized
QGQSGSPCHPAPYDARPYCNVGGGSSGGSGGSGGTSTSGRSANPRGGGSDIQMTQSPSSLSASVGDRVTITCRASQSISSYLNWYQQKPGKAPKLLIYAASSLQSGVPSRFSGSGSGTDFTLTISSLQPEDFATYYCQQDNGYPSTFGGGTKVEIKR

SEQ ID NO: 116 - DNA, 534 bp, Artificial Sequence
  chemically synthesized
caaggtcagtctggatccccgtgccatccgcatgcttatgatgctcgtccttattgcaatgtgggaggtggctcgagcggtggcagcggtggctctggtggtactagcacctctggtcgttccgctaacccacgtggcggcggttctgacatccagatgacccagagccccagcagcctgtctgctagcgtgggcgacagagtgaccatcacctgtagagccagccagagcatcagcagctacctgaactggtatcagcagaagcccggcaaggcccccaaactgctgatctacgccgccagctctctgcagtctggcgtgcccagcagattttccggcagcggctctggcaccgacttcaccctgaccatcagctccctgcagcccgaggacttcgccacctactactgccagcaggacaacggctaccccagcacctttggcggaggtaccaaggtggaaatcaagcgttgtgaggccactcacaagacatcaacttcacccattgtcaagagcttcaacaggaatgagtgt

SEQ ID NO: 117 - protein, 157 aa, Artificial Sequence
  chemically synthesized
QGQSGSPCHPHAYDARPYCNVGGGSSGGSGGSGGTSTSGRSANPRGGGSDIQMTQSPSSLSASVGDRVTITCRASQSISSYLNWYQQKPGKAPKLLIYAASSLQSGVPSRFSGSGSGTDFTLTISSLQPEDFATYYCQQDNGYPSTFGGGTKVEIKR

SEQ ID NO: 118 - DNA, 534 bp, Artificial Sequence
  chemically synthesized
caaggtcagtctggatccccgtgccatccgcatcctgctgatgctcgtccttattgcaatgtgggaggtggctcgagcggtggcagcggtggctctggtggtactagcacctctggtcgttccgctaacccacgtggcggcggttctgacatccagatgacccagagccccagcagcctgtctgctagcgtgggcgacagagtgaccatcacctgtagagccagccagagcatcagcagctacctgaactggtatcagcagaagcccggcaaggcccccaaactgctgatctacgccgccagctctctgcagtctggcgtgcccagcagattttccggcagcggctctggcaccgacttcaccctgaccatcagctccctgcagcccgaggacttcgccacctactactgccagcaggacaacggctaccccagcacctttggcggaggtaccaaggtggaaatcaagcgttgtgaggccactcacaagacatcaacttcacccattgtcaagagcttcaacaggaatgagtgt

SEQ ID NO: 119 - protein, 157 aa, Artificial Sequence
  chemically synthesized
QGQSGSPCHPHPADARPYCNVGGGSSGGSGGSGGTSTSGRSANPRGGGSDIQMTQSPSSLSASVGDRVTITCRASQSISSYLNWYQQKPGKAPKLLIYAASSLQSGVPSRFSGSGSGTDFTLTISSLQPEDFATYYCQQDNGYPSTFGGGTKVEIKR

SEQ ID NO: 120 - DNA, 534 bp, Artificial Sequence
  chemically synthesized
caaggtcagtctggatccccgtgccatccgcatccttatgctgctcgtccttattgcaatgtgggaggtggctcgagcggtggcagcggtggctctggtggtactagcacctctggtcgttccgctaacccacgtggcggcggttctgacatccagatgacccagagccccagcagcctgtctgctagcgtgggcgacagagtgaccatcacctgtagagccagccagagcatcagcagctacctgaactggtatcagcagaagcccggcaaggcccccaaactgctgatctacgccgccagctctctgcagtctggcgtgcccagcagattttccggcagcggctctggcaccgacttcaccctgaccatcagctccctgcagcccgaggacttcgccacctactactgccagcaggacaacggctaccccagcacctttggcggaggtaccaaggtggaaatcaagcgttgtgaggccactcacaagacatcaacttcacccattgtcaagagcttcaacaggaatgagtgt

SEQ ID NO: 121 - protein, 157 aa, Artificial Sequence
  chemically synthesized
QGQSGSPCHPHPYAARPYCNVGGGSSGGSGGSGGTSTSGRSANPRGGGSDIQMTQSPSSLSASVGDRVTITCRASQSISSYLNWYQQKPGKAPKLLIYAASSLQSGVPSRFSGSGSGTDFTLTISSLQPEDFATYYCQQDNGYPSTFGGGTKVEIKR

SEQ ID NO: 122 - DNA, 534 bp, Artificial Sequence
  chemically synthesized
caaggtcagtctggatccccgtgccatccgcatccttatgatgctgctccttattgcaatgtgggaggtggctcgagcggtggcagcggtggctctggtggtactagcacctctggtcgttccgctaacccacgtggcggcggttctgacatccagatgacccagagccccagcagcctgtctgctagcgtgggcgacagagtgaccatcacctgtagagccagccagagcatcagcagctacctgaactggtatcagcagaagcccggcaaggcccccaaactgctgatctacgccgccagctctctgcagtctggcgtgcccagcagattttccggcagcggctctggcaccgacttcaccctgaccatcagctccctgcagcccgaggacttcgccacctactactgccagcaggacaacggctaccccagcacctttggcggaggtaccaaggtggaaatcaagcgttgtgaggccactcacaagacatcaacttcacccattgtcaagagcttcaacaggaatgagtgt

SEQ ID NO: 123 - protein, 157 aa, Artificial Sequence
  chemically synthesized
QGQSGSPCHPHPYDAAPYCNVGGGSSGGSGGSGGTSTSGRSANPRGGGSDIQMTQSPSSLSASVGDRVTITCRASQSISSYLNWYQQKPGKAPKLLIYAASSLQSGVPSRFSGSGSGTDFTLTISSLQPEDFATYYCQQDNGYPSTFGGGTKVEIKR

SEQ ID NO: 124 - DNA, 534 bp, Artificial Sequence
  chemically synthesized
caaggtcagtctggatccccgtgccatccgcatccttatgatgctcgtcctgcttgcaatgtgggaggtggctcgagcggtggcagcggtggctctggtggtactagcacctctggtcgttccgctaacccacgtggcggcggttctgacatccagatgacccagagccccagcagcctgtctgctagcgtgggcgacagagtgaccatcacctgtagagccagccagagcatcagcagctacctgaactggtatcagcagaagcccggcaaggcccccaaactgctgatctacgccgccagctctctgcagtctggcgtgcccagcagattttccggcagcggctctggcaccgacttcaccctgaccatcagctccctgcagcccgaggacttcgccacctactactgccagcaggacaacggctaccccagcacctttggcggaggtaccaaggtggaaatcaagcgttgtgaggccactcacaagacatcaacttcacccattgtcaagagcttcaacaggaatgagtgt

SEQ ID NO: 125 - protein, 157 aa, Artificial Sequence
  chemically synthesized
QGQSGSPCHPHPYDARPACNVGGGSSGGSGGSGGTSTSGRSANPRGGGSDIQMTQSPSSLSASVGDRVTITCRASQSISSYLNWYQQKPGKAPKLLIYAASSLQSGVPSRFSGSGSGTDFTLTISSLQPEDFATYYCQQDNGYPSTFGGGTKVEIKR

SEQ ID NO: 126 - DNA, 534 bp, Artificial Sequence
  chemically synthesized
caaggtcagtctggatccccgtgccatccgcatccttatgatgctcgtccttattgcgctgtgggaggtggctcgagcggtggcagcggtggctctggtggtactagcacctctggtcgttccgctaacccacgtggcggcggttctgacatccagatgacccagagccccagcagcctgtctgctagcgtgggcgacagagtgaccatcacctgtagagccagccagagcatcagcagctacctgaactggtatcagcagaagcccggcaaggcccccaaactgctgatctacgccgccagctctctgcagtctggcgtgcccagcagattttccggcagcggctctggcaccgacttcaccctgaccatcagctccctgcagcccgaggacttcgccacctactactgccagcaggacaacggctaccccagcacctttggcggaggtaccaaggtggaaatcaagcgttgtgaggccactcacaagacatcaacttcacccattgtcaagagcttcaacaggaatgagtgt

SEQ ID NO: 127 - protein, 157 aa, Artificial Sequence
  chemically synthesized
QGQSGSPCHPHPYDARPYCAVGGGSSGGSGGSGGTSTSGRSANPRGGGSDIQMTQSPSSLSASVGDRVTITCRASQSISSYLNWYQQKPGKAPKLLIYAASSLQSGVPSRFSGSGSGTDFTLTISSLQPEDFATYYCQQDNGYPSTFGGGTKVEIKR

SEQ ID NO: 128 - DNA, 534 bp, Artificial Sequence
  chemically synthesized
caaggtcagtctggatccccgtgccatgcgcatccttatgatgctcgtccttattgcaatgtgggaggtggctcgagcggtggcagcggtggctctggtggtactagcacctctggtcgttccgctaacccacgtggcggcggttctgacatccagatgacccagagccccagcagcctgtctgctagcgtgggcgacagagtgaccatcacctgtagagccagccagagcatcagcagctacctgaactggtatcagcagaagcccggcaaggcccccaaactgctgatctacgccgccagctctctgcagtctggcgtgcccagcagattttccggcagcggctctggcaccgacttcaccctgaccatcagctccctgcagcccgaggacttcgccacctactactgccagcaggacaacggctaccccagcacctttggcggaggtaccaaggtggaaatcaagcgttgtgaggccactcacaagacatcaacttcacccattgtcaagagcttcaacaggaatgagtgt

SEQ ID NO: 129 - protein, 157 aa, Artificial Sequence
  chemically synthesized
QGQSGSPCHAHPYDARPYCNVGGGSSGGSGGSGGTSTSGRSANPRGGGSDIQMTQSPSSLSASVGDRVTITCRASQSISSYLNWYQQKPGKAPKLLIYAASSLQSGVPSRFSGSGSGTDFTLTISSLQPEDFATYYCQQDNGYPSTFGGGTKVEIKR

SEQ ID NO: 130 - DNA, 534 bp, Artificial Sequence
  chemically synthesized
caaggtcagtctggatccccgtgccatccgcatccttatgatgctcgtgcttattgcaatgtgggaggtggctcgagcggtggcagcggtggctctggtggtactagcacctctggtcgttccgctaacccacgtggcggcggttctgacatccagatgacccagagccccagcagcctgtctgctagcgtgggcgacagagtgaccatcacctgtagagccagccagagcatcagcagctacctgaactggtatcagcagaagcccggcaaggcccccaaactgctgatctacgccgccagctctctgcagtctggcgtgcccagcagattttccggcagcggctctggcaccgacttcaccctgaccatcagctccctgcagcccgaggacttcgccacctactactgccagcaggacaacggctaccccagcacctttggcggaggtaccaaggtggaaatcaagcgttgtgaggccactcacaagacatcaacttcacccattgtcaagagcttcaacaggaatgagtgt

SEQ ID NO: 131 - protein, 157 aa, Artificial Sequence
  chemically synthesized
QGQSGSPCHPHPYDARAYCNVGGGSSGGSGGSGGTSTSGRSANPRGGGSDIQMTQSPSSLSASVGDRVTITCRASQSISSYLNWYQQKPGKAPKLLIYAASSLQSGVPSRFSGSGSGTDFTLTISSLQPEDFATYYCQQDNGYPSTFGGGTKVEIKR

SEQ ID NO: 132 - DNA, 492 bp, Artificial Sequence
  chemically synthesized
caaggtcagtctggatccggaggtggctcgagcggtggcagcggtggctctggtggtattagcagtggtctgttaagcggtcgtagcgataatcatggcggttctgacatccagatgacccagagccccagcagcctgtctgctagcgtgggcgacagagtgaccatcacctgtagagccagccagagcatcagcagctacctgaactggtatcagcagaagcccggcaaggcccccaaactgctgatctacgccgccagctctctgcagtctggcgtgcccagcagattttccggcagcggctctggcaccgacttcaccctgaccatcagctccctgcagcccgaggacttcgccacctactactgccagcaggacaacggctaccccagcacctttggcggaggtaccaaggtggaaatcaagcgttgtgaggccactcacaagacatcaacttcacccattgtcaagagcttcaacaggaatgagtgt

SEQ ID NO: 133 - protein, 158 aa, Artificial Sequence
  chemically synthesized
QGQSGSLCEVLMLLQHPWCMGGGGSSGGSGGSGGISSGLLSGRSDNHGGSDIQMTQSPSSLSASVGDRVTITCRASQSISSYLNWYQQKPGKAPKLLIYAASSLQSGVPSRFSGSGSGTDFTLTISSLQPEDFATYYCQQDNGYPSTFGGGTKVEIKR

SEQ ID NO: 134 - DNA, 492 bp, Artificial Sequence; identical to SEQ ID NO: 132
  chemically synthesized

SEQ ID NO: 135 - protein, 158 aa, Artificial Sequence
  chemically synthesized
QGQSGSILYCDSWGAGCLTRPGGGSSGGSGGSGGISSGLLSGRSDNHGGSDIQMTQSPSSLSASVGDRVTITCRASQSISSYLNWYQQKPGKAPKLLIYAASSLQSGVPSRFSGSGSGTDFTLTISSLQPEDFATYYCQQDNGYPSTFGGGTKVEIKR

SEQ ID NO: 136 - DNA, 492 bp, Artificial Sequence; identical to SEQ ID NO: 132
  chemically synthesized

SEQ ID NO: 137 - protein, 158 aa, Artificial Sequence
  chemically synthesized
QGQSGSGIALCPSHFCQLPQTGGGSSGGSGGSGGISSGLLSGRSDNHGGSDIQMTQSPSSLSASVGDRVTITCRASQSISSYLNWYQQKPGKAPKLLIYAASSLQSGVPSRFSGSGSGTDFTLTISSLQPEDFATYYCQQDNGYPSTFGGGTKVEIKR

SEQ ID NO: 138 - DNA, 492 bp, Artificial Sequence; identical to SEQ ID NO: 132
  chemically synthesized

SEQ ID NO: 139 - protein, 158 aa, Artificial Sequence
  chemically synthesized
QGQSGSPCHPHPYDARPYCNVGGGSSGGSGGSGGISSGLLSGRSDNHGGSDIQMTQSPSSLSASVGDRVTITCRASQSISSYLNWYQQKPGKAPKLLIYAASSLQSGVPSRFSGSGSGTDFTLTISSLQPEDFATYYCQQDNGYPSTFGGGTKVEIKR

SEQ ID NO: 140 - DNA, 492 bp, Artificial Sequence; identical to SEQ ID NO: 132
  chemically synthesized

SEQ ID NO: 141 - protein, 158 aa, Artificial Sequence
  chemically synthesized
QGQSGSYLPCHFVPIGACNNKGGGSSGGSGGSGGISSGLLSGRSDNHGGSDIQMTQSPSSLSASVGDRVTITCRASQSISSYLNWYQQKPGKAPKLLIYAASSLQSGVPSRFSGSGSGTDFTLTISSLQPEDFATYYCQQDNGYPSTFGGGTKVEIKR

SEQ ID NO: 142 - DNA, 492 bp, Artificial Sequence; identical to SEQ ID NO: 132
  chemically synthesized

SEQ ID NO: 143 - protein, 158 aa, Artificial Sequence
  chemically synthesized
QGQSGSIFCHMGVVVPQCANYGGGSSGGSGGSGGISSGLLSGRSDNHGGSDIQMTQSPSSLSASVGDRVTITCRASQSISSYLNWYQQKPGKAPKLLIYAASSLQSGVPSRFSGSGSGTDFTLTISSLQPEDFATYYCQQDNGYPSTFGGGTKVEIKR

SEQ ID NO: 144 - DNA, 492 bp, Artificial Sequence; identical to SEQ ID NO: 132
  chemically synthesized

SEQ ID NO: 145 - protein, 158 aa, Artificial Sequence
  chemically synthesized
QGQSGSPCHPHAYDARPYCNVGGGSSGGSGGSGGISSGLLSGRSDNHGGSDIQMTQSPSSLSASVGDRVTITCRASQSISSYLNWYQQKPGKAPKLLIYAASSLQSGVPSRFSGSGSGTDFTLTISSLQPEDFATYYCQQDNGYPSTFGGGTKVEIKR

SEQ ID NO: 146 - DNA, 495 bp, Artificial Sequence
  chemically synthesized
caaggtcagtctggatccggaggtggctcgagcggtggcagcggtgctgtgggtctcctggctcccccgggcggcctgtccggccgcagcgataatcatggcggttctgacatccagatgacccagagccccagcagcctgtctgctagcgtgggcgacagagtgaccatcacctgtagagccagccagagcatcagcagctacctgaactggtatcagcagaagcccggcaaggcccccaaactgctgatctacgccgccagctctctgcagtctggcgtgcccagcagattttccggcagcggctctggcaccgacttcaccctgaccatcagctccctgcagcccgaggacttcgccacctactactgccagcaggacaacggctaccccagcacctttggcggaggtaccaaggtggaaatcaagcgttgtgaggccactcacaagacatcaacttcacccattgtcaagagcttcaacaggaatgagtgt

SEQ ID NO: 147 - protein, 159 aa, Artificial Sequence
  chemically synthesized
QGQSGSLCEVLMLLQHPWCMGGGGSSGGSGAVGLLAPPGGLSGRSDNHGGSDIQMTQSPSSLSASVGDRVTITCRASQSISSYLNWYQQKPGKAPKLLIYAASSLQSGVPSRFSGSGSGTDFTLTISSLQPEDFATYYCQQDNGYPSTFGGGTKVEIKR

SEQ ID NO: 148 - DNA, 495 bp, Artificial Sequence
  chemically synthesized
caaggtcagtctggatccggaggtggctcgagcggtggcagcggtgctgtgggtctcctggctcccccgggcggcctgtccggccgcagcgataatcatggcggttctgacatccagatgacccagagccccagcagcctgtctgctagcgtgggcgacagagtgaccatcacctgtagagccagccagagcatcagcagctacctgaactggtatcagcagaagcccggcaaggcccccaaactgctgatctacgccgccagctctctgcagtctggcgtgcccagcagattttccggcagcggctctggcaccgacttcaccctgaccatcagctccctgcagcccgaggacttcgccacctactactgccagcaggacaacggctaccccagcacctttggcggaggtaccaaggtggaaatcaagcgttgcgaagtcacccatcagggcctgagctcgcccgtcacaaagagcttcaacaggggagagtgt

SEQ ID NO: 149 - protein, 159 aa, Artificial Sequence
  chemically synthesized
QGQSGSILYCDSWGAGCLTRPGGGSSGGSGAVGLLAPPGGLSGRSDNHGGSDIQMTQSPSSLSASVGDRVTITCRASQSISSYLNWYQQKPGKAPKLLIYAASSLQSGVPSRFSGSGSGTDFTLTISSLQPEDFATYYCQQDNGYPSTFGGGTKVEIKR

SEQ ID NO: 150 - DNA, 495 bp, Artificial Sequence; identical to SEQ ID NO: 148
  chemically synthesized

SEQ ID NO: 151 - protein, 159 aa, Artificial Sequence
  chemically synthesized
QGQSGSGIALCPSHFCQLPQTGGGSSGGSGAVGLLAPPGGLSGRSDNHGGSDIQMTQSPSSLSASVGDRVTITCRASQSISSYLNWYQQKPGKAPKLLIYAASSLQSGVPSRFSGSGSGTDFTLTISSLQPEDFATYYCQQDNGYPSTFGGGTKVEIKR

SEQ ID NO: 152 - DNA, 495 bp, Artificial Sequence; identical to SEQ ID NO: 148
  chemically synthesized

SEQ ID NO: 153 - protein, 159 aa, Artificial Sequence
  chemically synthesized
QGQSGSYLPCHFVPIGACNNKGGGSSGGSGAVGLLAPPGGLSGRSDNHGGSDIQMTQSPSSLSASVGDRVTITCRASQSISSYLNWYQQKPGKAPKLLIYAASSLQSGVPSRFSGSGSGTDFTLTISSLQPEDFATYYCQQDNGYPSTFGGGTKVEIKR

SEQ ID NO: 154 - DNA, 495 bp, Artificial Sequence; identical to SEQ ID NO: 146
  chemically synthesized

SEQ ID NO: 155 - protein, 159 aa, Artificial Sequence
  chemically synthesized
QGQSGSIFCHMGVVVPQCANYGGGSSGGSGAVGLLAPPGGLSGRSDNHGGSDIQMTQSPSSLSASVGDRVTITCRASQSISSYLNWYQQKPGKAPKLLIYAASSLQSGVPSRFSGSGSGTDFTLTISSLQPEDFATYYCQQDNGYPSTFGGGTKVEIKR

SEQ ID NO: 156 - DNA, 495 bp, Artificial Sequence; identical to SEQ ID NO: 146
  chemically synthesized

SEQ ID NO: 157 - protein, 159 aa, Artificial Sequence
  chemically synthesized
QGQSGSPCHPHAYDARPYCNVGGGSSGGSGAVGLLAPPGGLSGRSDNHGGSDIQMTQSPSSLSASVGDRVTITCRASQSISSYLNWYQQKPGKAPKLLIYAASSLQSGVPSRFSGSGSGTDFTLTISSLQPEDFATYYCQQDNGYPSTFGGGTKVEIKR

SEQ ID NO: 158 - protein, 5 aa, Artificial Sequence
  chemically synthesized
SYAMS

SEQ ID NO: 159 - protein, 11 aa, Artificial Sequence
  chemically synthesized
AISGSGGSTYY

SEQ ID NO: 160 - protein, 11 aa, Artificial Sequence
  chemically synthesized
SIYSTGGATAY

SEQ ID NO: 161 - protein, 11 aa, Artificial Sequence
  chemically synthesized
  MISC_FEATURE (1)..(1): X is any amino acid
  MISC_FEATURE (3)..(5): X is any amino acid
  MISC_FEATURE (7)..(8): X is any amino acid
  MISC_FEATURE (10)..(10): X is any amino acid
XIXXXGXXTXY

SEQ ID NO: 162 - protein, 7 aa, Artificial Sequence
  chemically synthesized
SSAGFDY

SEQ ID NO: 163 - protein, 7 aa, Artificial Sequence
  chemically synthesized
  MISC_FEATURE (1)..(2): X is any amino acid
XXAGFDY

SEQ ID NO: 164 - protein, 7 aa, Artificial Sequence
  chemically synthesized
  MISC_FEATURE (2)..(3): X is any amino acid
SXXGFDY

SEQ ID NO: 165 - protein, 7 aa, Artificial Sequence
  chemically synthesized
  MISC_FEATURE (3)..(4): X is any amino acid
SSXXFDY

SEQ ID NO: 166 - protein, 7 aa, Artificial Sequence
  chemically synthesized
  MISC_FEATURE (1)..(1): X is any amino acid
  MISC_FEATURE (3)..(3): X is any amino acid
XSXGFDY

SEQ ID NO: 167 - protein, 7 aa, Artificial Sequence
  chemically synthesized
  MISC_FEATURE (1)..(1): X is any amino acid
  MISC_FEATURE (4)..(4): X is any amino acid
XSAXFDY

SEQ ID NO: 168 - protein, 7 aa, Artificial Sequence
  chemically synthesized
  MISC_FEATURE (2)..(2): X is any amino acid
  MISC_FEATURE (4)..(4): X is any amino acid
SXAXFDY

SEQ ID NO: 169 - protein, 7 aa, Artificial Sequence
  chemically synthesized
  MISC_FEATURE (1)..(1): X is any amino acid
  MISC_FEATURE (5)..(5): X is any amino acid
XSAGXDY

SEQ ID NO: 170 - protein, 7 aa, Artificial Sequence
  chemically synthesized
  MISC_FEATURE (2)..(2): X is any amino acid
  MISC_FEATURE (5)..(5): X is any amino acid
SXAGXDY

SEQ ID NO: 171 - protein, 7 aa, Artificial Sequence
  chemically synthesized
  MISC_FEATURE (3)..(3): X is any amino acid
  MISC_FEATURE (5)..(5): X is any amino acid
SSXGXDY

SEQ ID NO: 172 - protein, 7 aa, Artificial Sequence
  chemically synthesized
  MISC_FEATURE (4)..(5): X is any amino acid
SSAXXDY

SEQ ID NO: 173 - protein, 6 aa, Artificial Sequence
  chemically synthesized
  MISC_FEATURE (2)..(5): X is any amino acid
TXXXXF

SEQ ID NO: 174 - protein, 6 aa, Artificial Sequence
  chemically synthesized
QSISSY

SEQ ID NO: 175 - protein, 4 aa, Artificial Sequence
  chemically synthesized
AASS

SEQ ID NO: 176 - protein, 9 aa, Artificial Sequence
  chemically synthesized
CQQSYSTPP

SEQ ID NO: 177 - protein, 4 aa, Artificial Sequence
  chemically synthesized
YAST

SEQ ID NO: 178 - protein, 10 aa, Artificial Sequence
  chemically synthesized
CQQDNGYPST

SEQ ID NO: 179 - protein, 4 aa, Artificial Sequence
  chemically synthesized
  MISC_FEATURE (1)..(1): X is any amino acid
  MISC_FEATURE (4)..(4): X is any amino acid
XASX

SEQ ID NO: 180 - protein, 7 aa, Artificial Sequence
  chemically synthesized
  MISC_FEATURE (1)..(2): X is any amino acid
XXGYPST

SEQ ID NO: 181 - protein, 7 aa, Artificial Sequence
  chemically synthesized
  MISC_FEATURE (2)..(3): X is any amino acid
DXXYPST

SEQ ID NO: 182 - protein, 7 aa, Artificial Sequence
  chemically synthesized
  MISC_FEATURE (3)..(4): X is any amino acid
DNXXPST

SEQ ID NO: 183 - protein, 7 aa, Artificial Sequence
  chemically synthesized
  MISC_FEATURE (4)..(4): X is any amino acid
  MISC_FEATURE (6)..(6): X is any amino acid
DNGXPXT

SEQ ID NO: 184 - protein, 7 aa, Artificial Sequence
  chemically synthesized
  MISC_FEATURE (6)..(7): X is any amino acid
DNGYPXX

SEQ ID NO: 185 - protein, 7 aa, Artificial Sequence
  chemically synthesized
  MISC_FEATURE (1)..(1): X is any amino acid
  MISC_FEATURE (3)..(3): X is any amino acid
XNXYPST

SEQ ID NO: 186 - protein, 7 aa, Artificial Sequence
  chemically synthesized
  MISC_FEATURE (1)..(4): X is any amino acid
XNGXPST

SEQ ID NO: 187 - protein, 7 aa, Artificial Sequence
  chemically synthesized
  MISC_FEATURE (1)..(1): X is any amino acid
  MISC_FEATURE (6)..(6): X is any amino acid
XNGYPXT

SEQ ID NO: 188 - protein, 7 aa, Artificial Sequence
  chemically synthesized
  MISC_FEATURE (2)..(2): X is any amino acid
  misc_feature (4)..(4): Xaa can be any naturally occurring amino acid
  MISC_FEATURE (5)..(5): X is any amino acid
DXGXPST

SEQ ID NO: 189 - protein, 7 aa, Artificial Sequence
  chemically synthesized
  MISC_FEATURE (2)..(2): X is any amino acid
  MISC_FEATURE (6)..(6): X is any amino acid
DXGYPXT

SEQ ID NO: 190 - protein, 7 aa, Artificial Sequence
  chemically synthesized
  MISC_FEATURE (3)..(3): X is any amino acid
  MISC_FEATURE (6)..(6): X is any amino acid
DNXYPXT

SEQ ID NO: 191 - protein, 5 aa, Artificial Sequence
  chemically synthesized
GSGGS

SEQ ID NO: 192 - protein, 5 aa, Artificial Sequence
  chemically synthesized
GGGSN

SEQ ID NO: 193 - protein, 4 aa, Artificial Sequence
  chemically synthesized
GGSG

SEQ ID NO: 194 - protein, 5 aa, Artificial Sequence
  chemically synthesized
GGSGG

SEQ ID NO: 195 - protein, 5 aa, Artificial Sequence
  chemically synthesized
GSGSG

SEQ ID NO: 196 - protein, 5 aa, Artificial Sequence
  chemically synthesized
GSGGG

SEQ ID NO: 197 - protein, 5 aa, Artificial Sequence
  chemically synthesized
GGGSG

SEQ ID NO: 198 - protein, 5 aa, Artificial Sequence
  chemically synthesized
GSSSG

SEQ ID NO: 199 - protein, 13 aa, Artificial Sequence
  chemically synthesized
GSSGGSGGSGGSG

SEQ ID NO: 200 - protein, 11 aa, Artificial Sequence
  chemically synthesized
GSSGGSGGSGG

SEQ ID NO: 201 - protein, 12 aa, Artificial Sequence
  chemically synthesized
GSSGGSGGSGGS

SEQ ID NO: 202 - protein, 16 aa, Artificial Sequence
  chemically synthesized
GSSGGSGGSGGSGGGS

SEQ ID NO: 203 - protein, 10 aa, Artificial Sequence
  chemically synthesized
GSSGGSGGSG

SEQ ID NO: 204 - protein, 11 aa, Artificial Sequence
  chemically synthesized
GSSGGSGGSGS

SEQ ID NO: 205 - protein, 4 aa, Artificial Sequence
  chemically synthesized
GGGS

SEQ ID NO: 206 - protein, 5 aa, Artificial Sequence
  chemically synthesized
GSSGT

SEQ ID NO: 207 - protein, 4 aa, Artificial Sequence
  chemically synthesized
GSSG

SEQ ID NO: 208 - protein, 15 aa, Artificial Sequence
  chemically synthesized
YCEVSELFVLPWCMG

SEQ ID NO: 209 - protein, 11 aa, Artificial Sequence
  chemically synthesized
RASQSISSYLN

SEQ ID NO: 210 - protein, 7 aa, Artificial Sequence
  chemically synthesized
KASRLQS

SEQ ID NO: 211 - protein, 7 aa, Artificial Sequence
  chemically synthesized
RALKPVT

SEQ ID NO: 212 - protein, 5 aa, Artificial Sequence
  chemically synthesized
SYAMS

SEQ ID NO: 213 - protein, 14 aa, Artificial Sequence
  chemically synthesized
DITASGQRTTYADS

SEQ ID NO: 214 - protein, 7 aa, Artificial Sequence
  chemically synthesized
SKAIFDY

SEQ ID NO: 215 - protein, 7 aa, Artificial Sequence
  chemically synthesized
AASSLQS

SEQ ID NO: 216 - protein, 7 aa, Artificial Sequence
  chemically synthesized
SYSTPNT

SEQ ID NO: 217 - protein, 14 aa, Artificial Sequence
  chemically synthesized
SINKDGHYTSYADS

SEQ ID NO: 218 - protein, 7 aa, Artificial Sequence
  chemically synthesized
NLDEFDY

SEQ ID NO: 219 - protein, 7 aa, Artificial Sequence
  chemically synthesized
SASQLQS

SEQ ID NO: 220 - protein, 7 aa, Artificial Sequence
  chemically synthesized
ANSRPST

SEQ ID NO: 221 - protein, 14 aa, Artificial Sequence
  chemically synthesized
SIMATGAGTLYADS

SEQ ID NO: 222 - protein, 7 aa, Artificial Sequence
  chemically synthesized
DGAGFDY

SEQ ID NO: 223 - protein, 7 aa, Artificial Sequence
  chemically synthesized
NASSLQS

SEQ ID NO: 224 - protein, 6 aa, Artificial Sequence
  chemically synthesized
YPYGPG

SEQ ID NO: 225 - protein, 14 aa, Artificial Sequence
  chemically synthesized
TITSSGAATYYADS

SEQ ID NO: 226 - protein, 7 aa, Artificial Sequence
  chemically synthesized
NYTGFDY

SEQ ID NO: 227 - protein, 7 aa, Artificial Sequence
  chemically synthesized
YASTLQS

SEQ ID NO: 228 - protein, 7 aa, Artificial Sequence
  chemically synthesized
DNGYPST

SEQ ID NO: 229 - protein, 14 aa, Artificial Sequence
  chemically synthesized
SIYSTGGATAYADS

SEQ ID NO: 230 - protein, 7 aa, Artificial Sequence
  chemically synthesized
SSAGFDY

SEQ ID NO: 231 - protein, 15 aa, Artificial Sequence
  chemically synthesized
SSIYSTGGATAYADS

SEQ ID NO: 232 - protein, 12 aa, Artificial Sequence
  chemically synthesized
SSAGQSRPGFDY

SEQ ID NO: 233 - protein, 12 aa, Artificial Sequence
  chemically synthesized
SSAGQSWPGFDY

SEQ ID NO: 234 - protein, 12 aa, Artificial Sequence
  chemically synthesized
SSAGQSFPGFDY

SEQ ID NO: 235 - protein, 7 aa, Artificial Sequence
  chemically synthesized
WSAAFDY

SEQ ID NO: 236 - protein, 7 aa, Artificial Sequence
  chemically synthesized
WSAGYDY

SEQ ID NO: 237 - protein, 7 aa, Artificial Sequence
  chemically synthesized
WSKGFDY

SEQ ID NO: 238 - protein, 14 aa, Artificial Sequence
  chemically synthesized
SSIWKQGIVTVYDS

SEQ ID NO: 239 - protein, 14 aa, Artificial Sequence
  chemically synthesized
SSIWRNGIVTVYDS

SEQ ID NO: 240 - protein, 14 aa, Artificial Sequence
  chemically synthesized
SDIWKQGMVTVYDS

SEQ ID NO: 241 - protein, 14 aa, Artificial Sequence
  chemically synthesized
SSIWRQGLATAYDS

SEQ ID NO: 242 - protein, 14 aa, Artificial Sequence
  chemically synthesized
SEIVATGILTSYDS

SEQ ID NO: 243 - protein, 14 aa, Artificial Sequence
  chemically synthesized
SSIGRQGLITVYDS

SEQ ID NO: 244 - protein, 14 aa, Artificial Sequence
  chemically synthesized
SSIWYQGLVTVYDS

SEQ ID NO: 245 - protein, 13 aa, Artificial Sequence
  chemically synthesized
SDIWKQGFATADS

SEQ ID NO: 246 - protein, 15 aa, Artificial Sequence
  chemically synthesized
SSIWRNGIVTVYADS

SEQ ID NO: 247 - protein, 15 aa, Artificial Sequence
  chemically synthesized
SSIWYQGLVTVYADS

SEQ ID NO: 248 - protein, 117 aa, Artificial Sequence
  chemically synthesized
QVQLVQSGAEVKKPGASVKVSCKASGYTFTDYGFSWVRQAPGQGLEWMGWITAYNGNTNYAQKLQGRVTMTTDTSTSTVYMELRSLRSDDTAVYYCARDYFYGMDVWGQGTTVTVSS

SEQ ID NO: 249 - protein, 123 aa, Artificial Sequence
  chemically synthesized
QVQLVQSGAEVKKPGSSVKVSCKTSGDTFSTYAISWVRQAPGQGLEWMGGIIPIFGKAHYAQKFQGRVTITADESTSTAYMELSSLRSEDTAVYFCARKFHFVSGSPFGMDVWGQGTTVTVSS

SEQ ID NO: 250 - protein, 112 aa, Artificial Sequence
  chemically synthesized
QVQLVQSGAEVKKPGASVKVSCKASGYTFTSYDVHWVRQAPGQRLEWMGWLHADTGITKFSQKFQGRVTITRDTSASTAYMELSSLRSEDTAVYYCARERIQLWFDYWGQGT

SEQ ID NO: 251 - protein, 120 aa, Artificial Sequence
  chemically synthesized
QVQLVQSGAEVKKPGSSVKVSCKVSGGIFSTYAINWVRQAPGQGLEWMGGIIPIFGTANHAQKFQGRVTITADESTSTAYMELSSLRSEDTAVYYCARDQGIAAALFDYWGQGTLVTVSS

SEQ ID NO: 252 - protein, 110 aa, Artificial Sequence
  chemically synthesized
EVQLVESGGGLVQPGRSLRLSCAVSGFTFDDYVVHWVRQAPGKGLEWVSGNSGNIGYADSVKGRFTISRDNAKNSLYLQMNSLRAEDTALYYCAVPFDYWGQGTLVTVSS

SEQ ID NO: 253 - protein, 123 aa, Artificial Sequence
  chemically synthesized
QVQLVQSGAEVKKPGSSVKVSCKTSGDTFSSYAISWVRQAPGQGLEWMGGIIPIFGRAHYAQKFQGRVTITADESTSTAYMELSSLRSEDTAVYFCARKFHFVSGSPFGMDVWGQGTTVTVSS

SEQ ID NO: 254 - protein, 123 aa, Artificial Sequence
  chemically synthesized
QVQLVQSGAEVKKPGSSVKVSCKTSGGTFSSYAISWVRQAPGQGLEWMGGIIPIFGKAHYAQKFQGRVTITADESTTTAYMELSSLRSEDTAVYYCARKYDYVSGSPFGMDVWGQGTTVTVSS

SEQ ID NO: 255 - protein, 121 aa, Artificial Sequence
  chemically synthesized
QVQLVQSGAEVKKPGSSVKVSCKASGGTFSSYAINWVRQAPGQGLEWMGGIIPIFGSANYAQKFQDRVTITADESTSAAYMELSSLRSEDTAVYYCARDSSGWSRYYMDVWGQGTTVTVSS

SEQ ID NO: 256 - protein, 123 aa, Artificial Sequence
  chemically synthesized
QVQLVQSGAEVKEPGSSVKVSCKASGGTFNSYAISWVRQAPGQGLEWMGGIIPLFGIAHYAQKFQGRVTITADESTNTAYMDLSSLRSEDTAVYYCARKYSYVSGSPFGMDVWGQGTTVTVSS

SEQ ID NO: 257 - protein, 121 aa, Artificial Sequence
  chemically synthesized
EVQLVESGGGLVQPGRSLRLSCAASGITFDDYGMHWVRQAPGKGLEWVSGISWNRGRIEYADSVKGRFTISRDNAKNSLYLQMNSLRAEDTALYYCAKGRFRYFDWFLDYWGQGTLVTVSS

SEQ ID NO: 258 - protein, 107 aa, Artificial Sequence
  chemically synthesized
EIVLTQSPATLSLSPGERATLSCRASQSVSSYLVWYQQKPGQAPRLLIYDASNRATGIPARFSGSGSGTDFTLTISSLEPEDFAVYYCQQRSNWPRTFGQGTKVEIK

SEQ ID NO: 259 - protein, 106 aa, Artificial Sequence
  chemically synthesized
EIVLTQSPATLSLSPGERATLSCRASQSVSSYLAWYQQKPGQAPRLLIYDASNRATGIPARFSGSGSGTDFTLTISSLEPEDFAVYYCQQRSNWPTFGQGTKVEIK

SEQ ID NO: 260 - protein, 107 aa, Artificial Sequence
  chemically synthesized
DIQMTQSPSSLSASVGDRVTITCRASQGISSWLAWYQQKPEKAPKSLIYAASSLQSGVPSRFSGSGSGTDFTLTISSLQPEDFATYYCQQYNSYPYTFGQGTKLEIK

SEQ ID NO: 261 - protein, 108 aa, Artificial Sequence
  chemically synthesized
EIVLTQSPGTLSLSPGERATLSCRASQSVSSSYLAWYQQKPGQAPRLLIYGASSRATGIPDRFSGSGSGTDFTLTISRLEPEDFAVYYCQQYGSSPWTFGQGTKVEIK

SEQ ID NO: 262 - protein, 106 aa, Artificial Sequence
  chemically synthesized
EIVLTQSPGTLSLSPGERATLSCRASQSVSSSYLAWYQQKPGQAPRLLIYGASSRATGIPDRFSGSGSGTDFTLTISRLEPEDFAVYYCQQYGSSPFGGGTKVEIK

SEQ ID NO: 263 - protein, 106 aa, Artificial Sequence
  chemically synthesized
EIVLTQSPATLSLSPGERATLSCRASQSVSSYLAWYQQKPGQAPRLLIYDASNRATGIPARFSGSGSGTDFTLTISSLEPEDFAVYYCQQRSNWPTFGQGTRLEIK

SEQ ID NO: 264 - protein, 107 aa, Artificial Sequence
  chemically synthesized
AIQLTQSPSSLSASVGDRVTITCRASQGISSALAWYQQKPGKAPKLLIYDASSLESGVPSRFSGSGSGTDFTLTISSLQPEDFATYYCQQFNSYPFTFGPGTKVDIK

SEQ ID NO: 265 - protein, 121 aa, Artificial Sequence
  chemically synthesized
EVQLVESGGGLVQPGGSLRLSCAASGFTFSRYWMSWVRQAPGKGLEWVANIKQDGSEKYYVDSVKGRFTISRDNAKNSLYLQMNSLRAEDTAVYYCAREGGWFGELAFDYWGQGTLVTVSS

SEQ ID NO: 266 - protein, 108 aa, Artificial Sequence
  chemically synthesized
EIVLTQSPGTLSLSPGERATLSCRASQRVSSSYLAWYQQKPGQAPRLLIYDASSRATGIPDRFSGSGSGTDFTLTISRLEPEDFAVYYCQQYGSLPWTFGQGTKVEIK

SEQ ID NO: 267 - protein, 118 aa, Artificial Sequence
  chemically synthesized
EVQLVESGGGLVQPGGSLRLSCAASGFTFSDSWIHWVRQAPGKGLEWVAWISPYGGSTYYADSVKGRFTISADTSKNTAYLQMNSLRAEDTAVYYCARRHWPGGFDYWGQGTLVTVSA

SEQ ID NO: 268 - protein, 108 aa, Artificial Sequence
  chemically synthesized
DIQMTQSPSSLSASVGDRVTITCRASQDVSTAVAWYQQKPGKAPKLLIYSASFLYSGVPSRFSGSGSGTDFTLTISSLQPEDFATYYCQQYLYHPATFGQGTKVEIKR

SEQ ID NO: 269 - protein, 8 aa, Artificial Sequence
  chemically synthesized
DYFYGMDV

SEQ ID NO: 270 - protein, 14 aa, Artificial Sequence
  chemically synthesized
KFHFVSGSPFGMDV

SEQ ID NO: 271 - protein, 9 aa, Artificial Sequence
  chemically synthesized
ERIQLWFDY

SEQ ID NO: 272 - protein, 11 aa, Artificial Sequence
  chemically synthesized
DQGIAAALFDY

SEQ ID NO: 273 - protein, 4 aa, Artificial Sequence
  chemically synthesized
PFDY

SEQ ID NO: 274 - protein, 14 aa, Artificial Sequence
  chemically synthesized
KYDYVSGSPFGMDV

SEQ ID NO: 275 - protein, 12 aa, Artificial Sequence
  chemically synthesized
DSSGWSRYYMDV

SEQ ID NO: 276 - protein, 14 aa, Artificial Sequence
  chemically synthesized
KYSYVSGSPFGMDV

SEQ ID NO: 277 - protein, 12 aa, Artificial Sequence
  chemically synthesized
GRFRYFDWFLDY

SEQ ID NO: 278 - protein, 9 aa, Artificial Sequence
  chemically synthesized
QQRSNWPRT

SEQ ID NO: 279 - protein, 8 aa, Artificial Sequence
  chemically synthesized
QQRSNWPT

SEQ ID NO: 280 - protein, 9 aa, Artificial Sequence
  chemically synthesized
QQYNSYPYT

SEQ ID NO: 281 - protein, 9 aa, Artificial Sequence
  chemically synthesized
QQYGSSPWT

SEQ ID NO: 282 - protein, 7 aa, Artificial Sequence
  chemically synthesized
QQYGSSP

SEQ ID NO: 283 - protein, 9 aa, Artificial Sequence
  chemically synthesized
QQFNSYPFT

SEQ ID NO: 284 - protein, 17 aa, Artificial Sequence
  chemically synthesized
WITAYNGNTNYAQKLQG

SEQ ID NO: 285 - protein, 17 aa, Artificial Sequence
  chemically synthesized
GIIPIFGKAHYAQKFQG

SEQ ID NO: 286 - protein, 17 aa, Artificial Sequence
  chemically synthesized
WLHADTGITKFSQKFQG

SEQ ID NO: 287 - protein, 17 aa, Artificial Sequence
  chemically synthesized
GIIPIFGTANHAQKFQG

SEQ ID NO: 288 - protein, 17 aa, Artificial Sequence
  chemically synthesized
GISGNSGNIGYADSVKG

SEQ ID NO: 289 - protein, 17 aa, Artificial Sequence
  chemically synthesized
GIIPIFGRAHYAQKFQG

SEQ ID NO: 290 - protein, 17 aa, Artificial Sequence
  chemically synthesized
GIIPIFGSANYAQKFQD

SEQ ID NO: 291 - protein, 17 aa, Artificial Sequence
  chemically synthesized
GIIPLFGIAHYAQKFQG

SEQ ID NO: 292 - protein, 17 aa, Artificial Sequence
  chemically synthesized
GISWNRGRIEYADSVKG

SEQ ID NO: 293 - protein, 7 aa, Artificial Sequence
  chemically synthesized
DASNRAT

SEQ ID NO: 294 - protein, 7 aa, Artificial Sequence
  chemically synthesized
GASSRAT

SEQ ID NO: 295 - protein, 7 aa, Artificial Sequence
  chemically synthesized
DASSLES

SEQ ID NO: 296 - protein, 5 aa, Artificial Sequence
  chemically synthesized
DYGFS

SEQ ID NO: 297 - protein, 5 aa, Artificial Sequence
  chemically synthesized
TYAIS

SEQ ID NO: 298 - protein, 5 aa, Artificial Sequence
  chemically synthesized
SYDVH

SEQ ID NO: 299 - protein, 5 aa, Artificial Sequence
  chemically synthesized
TYAIN

SEQ ID NO: 300 - protein, 5 aa, Artificial Sequence
  chemically synthesized
DYVVH

SEQ ID NO: 301 - protein, 5 aa, Artificial Sequence
  chemically synthesized
SYAIS

SEQ ID NO: 302 - protein, 5 aa, Artificial Sequence
  chemically synthesized
SYAIN

SEQ ID NO: 303 - protein, 5 aa, Artificial Sequence
  chemically synthesized
DYGMH

SEQ ID NO: 304 - protein, 11 aa, Artificial Sequence
  chemically synthesized
RASQSVSSYLV

SEQ ID NO: 305 - protein, 11 aa, Artificial Sequence
  chemically synthesized
RASQSVSSYLA

SEQ ID NO: 306 - protein, 11 aa, Artificial Sequence
  chemically synthesized
RASQGISSWLA

SEQ ID NO: 307 - protein, 12 aa, Artificial Sequence
  chemically synthesized
RASQSVSSSYLA

SEQ ID NO: 308 - protein, 11 aa, Artificial Sequence
  chemically synthesized
RASQGISSALA

SEQ ID NO: 309 - protein, 5 aa, Artificial Sequence
  chemically synthesized
TYSMN

SEQ ID NO: 310 - protein, 16 aa, Artificial Sequence
  chemically synthesized
SISSSGDYIYYADSVK

SEQ ID NO: 311 - protein, 11 aa, Artificial Sequence
  chemically synthesized
DLVTSMVAFDY

SEQ ID NO: 312 - protein, 11 aa, Artificial Sequence
  chemically synthesized
SGDALPQKYVF

SEQ ID NO: 313 - protein, 7 aa, Artificial Sequence
  chemically synthesized
EDSKRPS

SEQ ID NO: 314 - protein, 11 aa, Artificial Sequence
  chemically synthesized
YSTDRSGNHRV

SEQ ID NO: 315 - protein, 5 aa, Artificial Sequence
  chemically synthesized
RYWMS

SEQ ID NO: 316 - protein, 17 aa, Artificial Sequence
  chemically synthesized
NIKQDGSEKYYVDSVKG

SEQ ID NO: 317 - protein, 12 aa, Artificial Sequence
  chemically synthesized
EGGWFGELAFDY

SEQ ID NO: 318 - protein, 12 aa, Artificial Sequence
  chemically synthesized
RASQRVSSSYLA

SEQ ID NO: 319 - protein, 7 aa, Artificial Sequence
  chemically synthesized
DASSRAT

SEQ ID NO: 320 - protein, 9 aa, Artificial Sequence
  chemically synthesized
QQYGSLPWT

SEQ ID NO: 321 - protein, 5 aa, Artificial Sequence
  chemically synthesized
SYWMS

SEQ ID NO: 322 - protein, 16 aa, Artificial Sequence
  chemically synthesized
NIKQDGGEQYYVDSVK

SEQ ID NO: 323 - protein, 11 aa, Artificial Sequence
  chemically synthesized
DWNYGYYDMDV

SEQ ID NO: 324 - protein, 12 aa, Artificial Sequence
  chemically synthesized
RASQSVSSNYLA

SEQ ID NO: 325 - protein, 7 aa, Artificial Sequence
  chemically synthesized
GTSSRAT

SEQ ID NO: 326 - protein, 9 aa, Artificial Sequence
  chemically synthesized
QQYGSSIFT

SEQ ID NO: 327 - protein, 11 aa, Artificial Sequence
  chemically synthesized
  MISC_FEATURE (5)..(5): X is D or V
  MISC_FEATURE (6)..(6): X is V or I
  MISC_FEATURE (7)..(7): X is S or N
  MISC_FEATURE (9)..(9): X is A or F
  MISC_FEATURE (10)..(10): X is V or L
RASQXXXTXXA

SEQ ID NO: 328 - protein, 7 aa, Artificial Sequence
  chemically synthesized
  MISC_FEATURE (4)..(4): X is F or T
  MISC_FEATURE (6)..(6): X is Y or A
SASXLXS

SEQ ID NO: 329 - protein, 9 aa, Artificial Sequence
  chemically synthesized
  MISC_FEATURE (3)..(3): X is Y, G, F, or S
  MISC_FEATURE (4)..(4): X is L, Y, F, or W
  MISC_FEATURE (5)..(5): X is Y, N, A, T, G, F, or I
  MISC_FEATURE (6)..(6): X is H, V, P, T, or I
  MISC_FEATURE (8)..(8): X is A, W, R, P, or T
QQXXXXPXT

SEQ ID NO: 330 - protein, 10 aa, Artificial Sequence
  chemically synthesized
  MISC_FEATURE (6)..(6): X is D or G
GFTFSXSWIH

SEQ ID NO: 331 - protein, 18 aa, Artificial Sequence
  chemically synthesized
  MISC_FEATURE (4)..(4): X is S or L
  MISC_FEATURE (10)..(10): X is T or S
AWIXPYGGSXYYADSVKG

SEQ ID NO: 332 - protein, 9 aa, Artificial Sequence
  chemically synthesized
RHWPGGFDY

SEQ ID NO: 333 - protein, 11 aa, Artificial Sequence
  chemically synthesized
RASQDVSTAVA

SEQ ID NO: 334 - protein, 7 aa, Artificial Sequence
  chemically synthesized
SASFLYS

SEQ ID NO: 335 - protein, 9 aa, Artificial Sequence
  chemically synthesized
QQYLYHPAT

SEQ ID NO: 336 - protein, 10 aa, Artificial Sequence
  chemically synthesized
GFTFSDSWIH

SEQ ID NO: 337 - protein, 18 aa, Artificial Sequence
  chemically synthesized
AWISPYGGSTYYADSVKG

SEQ ID NO: 338 - protein, 8 aa, Artificial Sequence
  chemically synthesized
TGRGPSWV

SEQ ID NO: 339 - protein, 8 aa, Artificial Sequence
  chemically synthesized
SARGPSRW

SEQ ID NO: 340 - protein, 8 aa, Artificial Sequence
  chemically synthesized
TARGPSFK

SEQ ID NO: 341 - protein, 8 aa, Artificial Sequence
  chemically synthesized
LSGRSDNH

SEQ ID NO: 342 - protein, 8 aa, Artificial Sequence
  chemically synthesized
GGWHTGRN

SEQ ID NO: 343 - protein, 8 aa, Artificial Sequence
  chemically synthesized
HTGRSGAL

SEQ ID NO: 344 - protein, 8 aa, Artificial Sequence
  chemically synthesized
PLTGRSGG

SEQ ID NO: 345 - protein, 8 aa, Artificial Sequence
  chemically synthesized
AARGPAIH

SEQ ID NO: 346 - protein, 8 aa, Artificial Sequence
  chemically synthesized
RGPAFNPM

SEQ ID NO: 347 - protein, 8 aa, Artificial Sequence
  chemically synthesized
SSRGPAYL

SEQ ID NO: 348 - protein, 8 aa, Artificial Sequence
  chemically synthesized
RGPATPIM

SEQ ID NO: 349 - protein, 4 aa, Artificial Sequence
  chemically synthesized
RGPA

SEQ ID NO: 350 - protein, 10 aa, Artificial Sequence
  chemically synthesized
GGQPSGMWGW

SEQ ID NO: 351 - protein, 10 aa, Artificial Sequence
  chemically synthesized
FPRPLGITGL

SEQ ID NO: 352 - protein, 10 aa, Artificial Sequence
  chemically synthesized
VHMPLGFLGP

SEQ ID NO: 353 - protein, 8 aa, Artificial Sequence
  chemically synthesized
SPLTGRSG

SEQ ID NO: 354 - protein, 8 aa, Artificial Sequence
  chemically synthesized
SAGFSLPA

SEQ ID NO: 355 - protein, 9 aa, Artificial Sequence
  chemically synthesized
LAPLGLQRR

SEQ ID NO: 356 - protein, 8 aa, Artificial Sequence
  chemically synthesized
SGGPLGVR

SEQ ID NO: 357 - protein, 4 aa, Artificial Sequence
  chemically synthesized
PLGL

SEQ ID NO: 358 - protein, 7 aa, Artificial Sequence
  chemically synthesized
ISSGLSS

SEQ ID NO: 359 - protein, 8 aa, Artificial Sequence
  chemically synthesized
QNQALRMA

SEQ ID NO: 360 - protein, 8 aa, Artificial Sequence
  chemically synthesized
AQNLLGMV

SEQ ID NO: 361 - protein, 8 aa, Artificial Sequence
  chemically synthesized
STFPFGMF

SEQ ID NO: 362 - protein, 8 aa, Artificial Sequence
  chemically synthesized
PVGYTSSL

SEQ ID NO: 363 - protein, 8 aa, Artificial Sequence
  chemically synthesized
DWLYWPGI

SEQ ID NO: 364 - protein, 8 aa, Artificial Sequence
  chemically synthesized
ISSGLLSS

SEQ ID NO: 365 - protein, 8 aa, Artificial Sequence
  chemically synthesized
LKAAPRWA

SEQ ID NO: 366 - protein, 8 aa, Artificial Sequence
  chemically synthesized
GPSHLVLT

SEQ ID NO: 367 - protein, 8 aa, Artificial Sequence
  chemically synthesized
LPGGLSPW

SEQ ID NO: 368 - protein, 8 aa, Artificial Sequence
  chemically synthesized
MGLFSEAG

SEQ ID NO: 369 - protein, 8 aa, Artificial Sequence
  chemically synthesized
SPLPLRVP

SEQ ID NO: 370 - protein, 8 aa, Artificial Sequence
  chemically synthesized
RMHLRSLG

SEQ ID NO: 371 - protein, 8 aa, Artificial Sequence
  chemically synthesized
LAAPLGLL

SEQ ID NO: 372 - protein, 8 aa, Artificial Sequence
  chemically synthesized
AVGLLAPP

SEQ ID NO: 373 - protein, 8 aa, Artificial Sequence
  chemically synthesized
LLAPSHRA

SEQ ID NO: 374 - protein, 8 aa, Artificial Sequence
  chemically synthesized
PAGLWLDP

SEQ ID NO: 375 - protein, 7 aa, Artificial Sequence
  chemically synthesized
GPRSFGL

SEQ ID NO: 376 - protein, 6 aa, Artificial Sequence
  chemically synthesized
GPRSFG

SEQ ID NO: 377 - protein, 13 aa, Artificial Sequence
  chemically synthesized
ISSGLLSGRSDNH

SEQ ID NO: 378 - protein, 22 aa, Artificial Sequence
  chemically synthesized
ISSGLLSSGGSGGSLSGRSDNH

SEQ ID NO: 379 - protein, 22 aa, Artificial Sequence
  chemically synthesized
AVGLLAPPGGTSTSGRSANPRG

SEQ ID NO: 380 - protein, 22 aa, Artificial Sequence
  chemically synthesized
TSTSGRSANPRGGGAVGLLAPP

SEQ ID NO: 381 - protein, 24 aa, Artificial Sequence
  chemically synthesized
VHMPLGFLGPGGTSTSGRSANPRG

SEQ ID NO: 382 - protein, 24 aa, Artificial Sequence
  chemically synthesized
TSTSGRSANPRGGGVHMPLGFLGP

SEQ ID NO: 383 - protein, 18 aa, Artificial Sequence
  chemically synthesized
AVGLLAPPGGLSGRSDNH

SEQ ID NO: 384 - protein, 18 aa, Artificial Sequence
  chemically synthesized
LSGRSDNHGGAVGLLAPP

SEQ ID NO: 385 - protein, 20 aa, Artificial Sequence
  chemically synthesized
VHMPLGFLGPGGLSGRSDNH

SEQ ID NO: 386 - protein, 20 aa, Artificial Sequence
  chemically synthesized
LSGRSDNHGGVHMPLGFLGP

SEQ ID NO: 387 - protein, 22 aa, Artificial Sequence
  chemically synthesized
LSGRSDNHGGSGGSISSGLLSS

SEQ ID NO: 388 - protein, 22 aa, Artificial Sequence
  chemically synthesized
LSGRSGNHGGSGGSISSGLLSS

SEQ ID NO: 389 - protein, 22 aa, Artificial Sequence
  chemically synthesized
ISSGLLSSGGSGGSLSGRSGNH

SEQ ID NO: 390 - protein, 22 aa, Artificial Sequence
  chemically synthesized
LSGRSDNHGGSGGSQNQALRMA

SEQ ID NO: 391 - protein, 22 aa, Artificial Sequence
  chemically synthesized
QNQALRMAGGSGGSLSGRSDNH

SEQ ID NO: 392 - protein, 22 aa, Artificial Sequence
  chemically synthesized
LSGRSGNHGGSGGSQNQALRMA

SEQ ID NO: 393 - protein, 22 aa, Artificial Sequence
  chemically synthesized
QNQALRMAGGSGGSLSGRSGNH

SEQ ID NO: 394 - protein, 13 aa, Artificial Sequence
  chemically synthesized
ISSGLLSGRSGNH

SEQ ID NO: 395 - protein, 6 aa, Artificial Sequence
  chemically synthesized
GQSGQG

SEQ ID NO: 396 - protein, 8 aa, Artificial Sequence
  chemically synthesized
PRFKIIGG

SEQ ID NO: 397 - protein, 8 aa, Artificial Sequence
  chemically synthesized
PRFRIIGG

SEQ ID NO: 398 - protein, 9 aa, Artificial Sequence
  chemically synthesized
SSRHRRALD

SEQ ID NO: 399 - protein, 14 aa, Artificial Sequence
  chemically synthesized
RKSSIIIRMRDVVL

SEQ ID NO: 400 - protein, 15 aa, Artificial Sequence
  chemically synthesized
SSSFDKGKYKKGDDA

SEQ ID NO: 401 - protein, 15 aa, Artificial Sequence
  chemically synthesized
SSSFDKGKYKRGDDA

SEQ ID NO: 402 - protein, 4 aa, Artificial Sequence
  chemically synthesized
IEGR

SEQ ID NO: 403 - protein, 4 aa, Artificial Sequence
  chemically synthesized
IDGR

SEQ ID NO: 404 - protein, 7 aa, Artificial Sequence
  chemically synthesized
GGSIDGR

SEQ ID NO: 405 - protein, 6 aa, Artificial Sequence
  chemically synthesized
PLGLWA

SEQ ID NO: 406 - protein, 8 aa, Artificial Sequence
  chemically synthesized
GPQGIAGQ

SEQ ID NO: 407 - protein, 8 aa, Artificial Sequence
  chemically synthesized
GPQGLLGA

SEQ ID NO: 408 - protein, 5 aa, Artificial Sequence
  chemically synthesized
GIAGQ

SEQ ID NO: 409 - protein, 8 aa, Artificial Sequence
  chemically synthesized
GPLGIAGI

SEQ ID NO: 410 - protein, 8 aa, Artificial Sequence
  chemically synthesized
GPEGLRVG

SEQ ID NO: 411 - protein, 8 aa, Artificial Sequence
  chemically synthesized
YGAGLGVV

SEQ ID NO: 412 - protein, 8 aa, Artificial Sequence
  chemically synthesized
AGLGVVER

SEQ ID NO: 413 - protein, 8 aa, Artificial Sequence
  chemically synthesized
AGLGISST

SEQ ID NO: 414 - protein, 8 aa, Artificial Sequence
  chemically synthesized
EPQALAMS

SEQ ID NO: 415 - protein, 8 aa, Artificial Sequence
  chemically synthesized
QALAMSAI

SEQ ID NO: 416 - protein, 8 aa, Artificial Sequence
  chemically synthesized
AAYHLVSQ

SEQ ID NO: 417 - protein, 8 aa, Artificial Sequence
  chemically synthesized
MDAFLESS

SEQ ID NO: 418 - protein, 8 aa, Artificial Sequence
  chemically synthesized
ESLPVVAV

SEQ ID NO: 419 - protein, 8 aa, Artificial Sequence
  chemically synthesized
SAPAVESE

SEQ ID NO: 420 - protein, 8 aa, Artificial Sequence
  chemically synthesized
DVAQFVLT

SEQ ID NO: 421 - protein, 8 aa, Artificial Sequence
  chemically synthesized
VAQFVLTE

SEQ ID NO: 422 - protein, 8 aa, Artificial Sequence
  chemically synthesized
AQFVLTEG

SEQ ID NO: 423 - protein, 8 aa, Artificial Sequence
  chemically synthesized
PVQPIGPQ

SEQ ID NO: 424 - protein, 273 aa, Artificial Sequence
  chemically synthesized
GGGSGGGGSGSGGGSGGGGSGGGEIVLTQSPGTLSLSPGERATLSCRASQSVSSSYLAWYQQKPGQAPRLLIYGASSRATGIPDRFSGSGSGTDFTLTISRLEPEDFAVYYCQQYGSSPLTFGGGTKVEIKRSGGSTITSYNVYYTKLSSSGTQVQLVQTGGGVVQPGRSLRLSCAASGSTFSSYAMSWVRQAPGKGLEWVSAISGSGGSTYYADSVKGRFTISRDNSKNTLYLQMNSLRAEDTAVYYCATNSLYWYFDLWGRGTLVTVSSAS

SEQ ID NO: 425 - protein, 264 aa, Artificial Sequence
  chemically synthesized
GGGSGGGGSGSGGGSGGGGSGGGQVQLQQSGAELARPGASVKMSCKASGYTFTRYTMHWVKQRPGQGLEWIGYINPSRGYTNYNQKFKDKATLTTDKSSSTAYMQLSSLTSEDSAVYYCARYYDDHYCLDYWGQGTTLTVSSGGGGSGGGGSGGGGSQIVLTQSPAIMSASPGEKVTMTCSASSSVSYMNWYQQKSGTSPKRWIYDTSKLASGVPAHFRGSGSGTSYSLTISGMEAEDAATYYCQQWSSNPFTFGSGTKLEINR

SEQ ID NO: 426 - protein, 15 aa, Artificial Sequence
  chemically synthesized
SCLMHPHYAHDYCYV

SEQ ID NO: 427 - protein, 804 aa, Artificial Sequence
  chemically synthesized
CAGGGCCAGTCCGGCTCATATCTGCCCTGCCACTTCGTGCCAATCGGGGCCTGTAACAATAAGGGCGGTGGATCTAGTGGTGGCTCAGGCGGGTCTGGCGGCATTTCCAGTGGACTCTTGTCAGGACGATCCGATAATCATGGCGGGTCCGACATCCAGATGACACAGAGCCCTTCTTCCCTCTCCGCAAGCGTTGGCGACAGGGTCACCATTACCTGTAGGGCTTCTCAGAGCATCTCAAGCTATCTGAACTGGTACCAGCAGAAACCTGGAAAGGCTCCAAAACTGCTGATTTACGCTGCCTCCAGTCTTCAGTCAGGCGTCCCCTCCAGATTTAGCGGATCAGGTAGTGGAACTGATTTTACCCTTACAATATCTTCTCTGCAGCCAGAGGACTTCGCCACATACTATTGTCAGCAAGACAATGGTTACCCCAGTACATTTGGCGGAGGGACAAAGGTCGAGATCAAAAGGACCGTAGCAGCACCAAGCGTCTTTATTTTCCCCCCCAGTGACGAACAGCTGAAGAGCGGAACAGCTTCAGTGGTGTGTCTCCTGAATAACTTCTATCCACGCGAGGCAAAGGTGCAGTGGAAGGTGGACAATGCACTGCAGTCTGGTAATTCCCAAGAAAGTGTTACTGAGCAGGATTCCAAGGATTCAACTTACTCTCTGTCTAGCACCCTGACTCTTTCTAAAGCAGATTATGAGAAGCATAAGGTCTACGCTTGCGAGGTGACCCACCAGGGGCTTTCCTCTCCAGTTACCAAGTCATTCAACCGGGGTGAGTGTTGATGAGAATTC

SEQ ID NO: 428 - protein, 264 aa, Artificial Sequence
  chemically synthesized
QGQSGSGIALCPSHFCQLPQTGGGSSGGSGGSGGISSGLLSGRSDNHGGSDIQMTQSPSSLSASVGDRVTITCRASQSISSYLNWYQQKPGKAPKLLIYAASSLQSGVPSRFSGSGSGTDFTLTISSLQPEDFATYYCQQDNGYPSTFGGGTKVEIKRTVAAPSVFIFPPSDEQLKSGTASVVCLLNNFYPREAKVQWKVDNALQSGNSQESVTEQDSKDSTYSLSSTLTLSKADYEKHKVYACEVTHQGLSSPVTKSFNRGEC

SEQ ID NO: 429 - protein, 1371 aa, Artificial Sequence
  chemically synthesized
GAAGTGCAGCTGCTCGAAAGCGGCGGAGGCTTGGTGCAGCCAGGAGGGAGCCTGCGACTGTCTTGCGCAGCCAGCGGATTCACTTTCTCTTCCTATGCCATGAGCTGGGTTCGACAGGCACCCGGCAAAGGTCTCGAGTGGGTGTCTAGCATCTGGCGAAACGGAATAGTTACAGTGTATGCCGATAGCGTGAAGGGTCGCTTTACTATTTCACGGGATAATTCTAAGAACACCCTCTACCTGCAAATGAATAGCCTTAGGGCAGAAGATACCGCCGTGTACTACTGTGCCAAATGGTCCGCAGCCTTTGACTACTGGGGCCAGGGGACACTGGTGACCGTGTCCTCTGCATCAACCAAGGGGCCATCAGTGTTCCCACTCGCCCCATCTTCCAAGAGTACTTCCGGCGGAACCGCAGCCCTTGGCTGCCTTGTTAAGGACTATTTCCCAGAACCCGTGACCGTAAGTTGGAACTCTGGCGCCCTTACTTCTGGGGTGCACACCTTCCCAGCAGTGTTGCAGTCCAGTGGCCTTTACTCTCTGTCTAGTGTAGTGACTGTGCCTTCCTCTAGTCTCGGTACCCAGACCTATATTTGTAATGTTAACCATAAGCCCAGCAATACAAAGGTTGATAAGAAAGTGGAACCCAAGAGCTGCGATAAGACACATACCTGCCCACCTTGTCCAGCTCCCGAGCTGCTGGGCGGACCCTCAGTCTTTCTCTTCCCACCTAAACCCAAGGATACCCTTATGATCTCCAGGACTCCTGAGGTGACCTGCGTTGTGGTCGACGTGTCACATGAGGACCCTGAGGTAAAGTTTAACTGGTACGTGGACGGTGTGGAGGTACATAACGCTAAGACTAAGCCACGAGAGGAGCAATACGCTTCCACTTACAGGGTGGTCAGCGTCCTGACCGTTCTCCATCAGGACTGGCTGAACGGGAAGGAATATAAGTGTAAGGTTAGCAACAAAGCTCTCCCTGCACCAATCGAGAAGACAATCAGCAAGGCAAAAGGGCAGCCTCGGGAACCTCAGGTCTACACCCTCCCTCCTAGCAGGGAAGAGATGACAAAGAACCAGGTCTCTCTCACCTGCCTGGTGAAAGGCTTCTATCCATCTGACATTGCTGTGGAGTGGGAATCCAACGGCCAGCCTGAAAATAATTATAAGACCACACCCCCCGTCCTTGATTCCGATGGATCTTTCTTCCTGTACAGTAAACTCACCGTCGACAAATCACGGTGGCAGCAAGGTAACGTGTTCAGCTGTTCTGTCATGCATGAGGCTCTGCATAACCATTACACACAAAAGTCTTTGTCATTGTCTCCAGGATGATGAGAATTCATTGATCATAATCAGCCATACCAC

SEQ ID NO: 430 - protein, 445 aa, Artificial Sequence
  chemically synthesized
EVQLLESGGGLVQPGGSLRLSCAASGFTFSSYAMSWVRQAPGKGLEWVSSIWRNGIVTVYADSVKGRFTISRDNSKNTLYLQMNSLRAEDTAVYYCAKWSAAFDYWGQGTLVTVSSASTKGPSVFPLAPSSKSTSGGTAALGCLVKDYFPEPVTVSWNSGALTSGVHTFPAVLQSSGLYSLSSVVTVPSSSLGTQTYICNVNHKPSNTKVDKKVEPKSCDKTHTCPPCPAPELLGGPSVFLFPPKPKDTLMISRTPEVTCVVVDVSHEDPEVKFNWYVDGVEVHNAKTKPREEQYNSTYRVVSVLTVLHQDWLNGKEYKCKVSNKALPAPIEKTISKAKGQPREPQVYTLPPSREEMTKNQVSLTCLVKGFYPSDIAVEWESNGQPENNYKTTPPVLDSDGSFFLYSKLTVDKSRWQQGNVFSCSVMHEALHNHYTQKSLSLSPG

SEQ ID NO: 431 - protein, 1362 aa, Artificial Sequence
  chemically synthesized
GAAGTGCAGCTGCTCGAAAGCGGCGGAGGCTTGGTGCAGCCAGGAGGGAGCCTGCGACTGTCTTGCGCAGCCAGCGGATTCACTTTCTCTTCCTATGCCATGAGCTGGGTTCGACAGGCACCCGGCAAAGGTCTCGAGTGGGTGTCTAGCATCTGGCGAAACGGAATAGTTACAGTGTATGCCGATAGCGTGAAGGGTCGCTTTACTATTTCACGGGATAATTCTAAGAACACCCTCTACCTGCAAATGAATAGCCTTAGGGCAGAAGATACCGCCGTGTACTACTGTGCCAAATGGTCCGCAGCCTTTGACTACTGGGGCCAGGGGACACTGGTGACCGTGTCCTCTGCATCAACCAAGGGGCCATCAGTGTTCCCACTCGCCCCATGTAGCAGATCAACATCTGAATCCACCGCAGCCCTTGGCTGCCTTGTTAAGGACTATTTCCCAGAACCCGTGACCGTAAGTTGGAACTCTGGCGCCCTTACTTCTGGGGTGCACACCTTCCCAGCAGTGTTGCAGTCCAGTGGCCTTTACTCTCTGTCTAGTGTAGTGACTGTGCCTTCCTCTAGTCTCGGTACCAAGACCTATACCTGCAACGTAGATCATAAGCCCAGCAATACAAAGGTTGATAAGAGAGTAGAGTCAAAGTACGGCCCACCCTGCCCACCTTGTCCAGCTCCCGAGTTCCTGGGCGGACCCTCAGTCTTTCTCTTCCCACCTAAACCCAAGGATACCCTTATGATCTCCAGGACTCCTGAGGTGACCTGCGTTGTGGTCGACGTGTCACAAGAGGACCCTGAGGTACAGTTTAACTGGTACGTGGACGGTGTGGAGGTACATAACGCTAAGACTAAGCCACGAGAGGAGCAATTTAACTCCACTTACAGGGTGGTCAGCGTCCTGACCGTTCTCCATCAGGACTGGCTGAACGGGAAGGAATATAAGTGTAAGGTTAGCAACAAAGGTCTGCCCAGTTCTATCGAGAAGACAATCAGCAAGGCAAAAGGGCAGCCTCGGGAACCTCAGGTCTACACCCTCCCTCCTAGCCAGGAAGAGATGACAAAGAACCAGGTCTCTCTCACCTGCCTGGTGAAAGGCTTCTATCCATCTGACATTGCTGTGGAGTGGGAATCCAACGGCCAGCCTGAAAATAATTATAAGACCACACCCCCCGTCCTTGATTCCGATGGATCTTTCTTCCTGTACAGTCGCCTCACCGTCGACAAATCACGGTGGCAGGAAGGTAACGTGTTCAGCTGTTCTGTCATGCATGAGGCTCTGCATAACCATTACACACAAAAGTCTTTGTCATTGTCTCTCGGATGATGAGAATTCATTGATCATAATCAGCCATACCAC

SEQ ID NO: 432 - protein, 442 aa, Artificial Sequence
  chemically synthesized
EVQLLESGGGLVQPGGSLRLSCAASGFTFSSYAMSWVRQAPGKGLEWVSSIWRNGIVTVYADSVKGRFTISRDNSKNTLYLQMNSLRAEDTAVYYCAKWSAAFDYWGQGTLVTVSSASTKGPSVFPLAPCSRSTSESTAALGCLVKDYFPEPVTVSWNSGALTSGVHTFPAVLQSSGLYSLSSVVTVPSSSLGTKTYTCNVDHKPSNTKVDKRVESKYGPPCPPCPAPEFLGGPSVFLFPPKPKDTLMISRTPEVTCVVVDVSQEDPEVQFNWYVDGVEVHNAKTKPREEQFNSTYRVVSVLTVLHQDWLNGKEYKCKVSNKGLPSSIEKTISKAKGQPREPQVYTLPPSQEEMTKNQVSLTCLVKGFYPSDIAVEWESNGQPENNYKTTPPVLDSDGSFFLYSRLTVDKSRWQEGNVFSCSVMHEALHNHYTQKSLSLSLG

SEQ ID NO: 433 - protein, 1371 aa, Artificial Sequence; identical to SEQ ID NO: 429
  chemically synthesized

SEQ ID NO: 434 - protein, 445 aa, Artificial Sequence
  chemically synthesized
EVQLLESGGGLVQPGGSLRLSCAASGFTFSSYAMSWVRQAPGKGLEWVSSIWRNGIVTVYADSVKGRFTISRDNSKNTLYLQMNSLRAEDTAVYYCAKWSAAFDYWGQGTLVTVSSASTKGPSVFPLAPSSKSTSGGTAALGCLVKDYFPEPVTVSWNSGALTSGVHTFPAVLQSSGLYSLSSVVTVPSSSLGTQTYICNVNHKPSNTKVDKKVEPKSCDKTHTCPPCPAPELLGGPSVFLFPPKPKDTLMISRTPEVTCVVVDVSHEDPEVKFNWYVDGVEVHNAKTKPREEQYASTYRVVSVLTVLHQDWLNGKEYKCKVSNKALPAPIEKTISKAKGQPREPQVYTLPPSREEMTKNQVSLTCLVKGFYPSDIAVEWESNGQPENNYKTTPPVLDSDGSFFLYSKLTVDKSRWQQGNVFSCSVMHEALHNHYTQKSLSLSPG

SEQ ID NO: 435 - protein, 12 aa, Artificial Sequence
  chemically synthesized
NTLSGRSENHSG

SEQ ID NO: 436 - protein, 12 aa, Artificial Sequence
  chemically synthesized
NTLSGRSGNHGS

SEQ ID NO: 437 - protein, 12 aa, Artificial Sequence
  chemically synthesized
TSTSGRSANPRG

SEQ ID NO: 438 - protein, 8 aa, Artificial Sequence
  chemically synthesized
TSGRSANP

SEQ ID NO: 439 - protein, 8 aa, Artificial Sequence
  chemically synthesized
VAGRSMRP

SEQ ID NO: 440 - protein, 8 aa, Artificial Sequence
  chemically synthesized
VVPEGRRS

SEQ ID NO: 441 - protein, 8 aa, Artificial Sequence
  chemically synthesized
ILPRSPAF

SEQ ID NO: 442 - protein, 8 aa, Artificial Sequence
  chemically synthesized
MVLGRSLL

SEQ ID NO: 443 - protein, 8 aa, Artificial Sequence
  chemically synthesized
QGRAITFI

SEQ ID NO: 444 - protein, 8 aa, Artificial Sequence
  chemically synthesized
SPRSIMLA

SEQ ID NO: 445 - protein, 8 aa, Artificial Sequence
  chemically synthesized
SMLRSMPL

SEQ ID NO: 446 - protein, 12 aa, Artificial Sequence
  chemically synthesized
DYFWSGFSAFDI

SEQ ID NO: 447 - protein, 7 aa, Artificial Sequence
  chemically synthesized
KASTLES

SEQ ID NO: 448 - protein, 9 aa, Artificial Sequence
  chemically synthesized
QQSYSTPWT

SEQ ID NO: 449 - protein, 120 aa, Artificial Sequence
  chemically synthesized
QMQLVQSGGGLVQPGGSLRLSCAASGFTFSSYWMSWVRQAPGKGLEWVANIKQDGSEKYYVDSVKGRFTISRDNAKNSLYLQMNSLRAEDTAVYYCARDYFWSGFSAFDIWGKGTLVTVS

SEQ ID NO: 450 - protein, 107 aa, Artificial Sequence
  chemically synthesized
DIVMTQSPSTLSASVGDRVTITCRASQGISSWLAWYQQKPGRAPKVLIYKASTLESGVPSRFSGSGSGTDFTLTISSLQPEDFATYYCQQSYSTPWTFGQGTKLEIK

SEQ ID NO: 451 - protein, 118 aa, Artificial Sequence
  chemically synthesized
EVQLVESGGGLVQPGGSLRLSCAASGFTFSGSWIHWVRQAPGKGLEWVAWILPYGGSSYYADSVKGRFTISADTSKNTAYLQMNSLRAEDTAVYYCARRHWPGGFDYWGQGTLVTVSA

SEQ ID NO: 452 - protein, 108 aa, Artificial Sequence
  chemically synthesized
DIQMTQSPSSLSASVGDRVTITCRASQDVSTAVAWYQQKPGKAPKLLIYSASFLYSGVPSRFSGSGSGTDFTLTISSLQPEDFATYYCQQYYNVPWTFGQGTKVEIKR

SEQ ID NO: 453 - protein, 108 aa, Artificial Sequence
  chemically synthesized
DIQMTQSPSSLSASVGDRVTITCRASQDVSTAVAWYQQKPGKAPKLLIYSASFLYSGVPSRFSGSGSGTDFTLTISSLQPEDFATYYCQQYYAPPWTFGQGTKVEIKR

SEQ ID NO: 454 - protein, 108 aa, Artificial Sequence
  chemically synthesized
DIQMTQSPSSLSASVGDRVTITCRASQDVSTAVAWYQQKPGKAPKLLIYSASFLYSGVPSRFSGSGSGTDFTLTISSLQPEDFATYYCQQYYTVPWTFGQGTKVEIKR

SEQ ID NO: 455 - protein, 108 aa, Artificial Sequence
  chemically synthesized
DIQMTQSPSSLSASVGDRVTITCRASQVINTFLAWYQQKPGKAPKLLIYSASTLASGVPSRFSGSGSGTDFTLTISSLQPEDFATYYCQQYYTVPRTFGQGTKVEIKR

SEQ ID NO: 456 - protein, 108 aa, Artificial Sequence
  chemically synthesized
DIQMTQSPSSLSASVGDRVTITCRASQDVSTAVAWYQQKPGKAPKLLIYSASFLYSGVPSRFSGSGSGTDFTLTISSLQPEDFATYYCQQGYGVPRTFGQGTKVEIKR

SEQ ID NO: 457 - protein, 108 aa, Artificial Sequence
  chemically synthesized
DIQMTQSPSSLSASVGDRVTITCRASQDVSTAVAWYQQKPGKAPKLLIYSASFLYSGVPSRFSGSGSGTDFTLTISSLQPEDFATYYCQQYLFTPPTFGQGTKVEIKR

SEQ ID NO: 458 - protein, 108 aa, Artificial Sequence
  chemically synthesized
DIQMTQSPSSLSASVGDRVTITCRASQDVSTAVAWYQQKPGKAPKLLIYSASFLYSGVPSRFSGSGSGTDFTLTISSLQPEDFATYYCQQYFITPTTFGQGTKVEIKR

SEQ ID NO: 459 - protein, 108 aa, Artificial Sequence
  chemically synthesized
DIQMTQSPSSLSASVGDRVTITCRASQDVSTAVAWYQQKPGKAPKLLIYSASFLYSGVPSRFSGSGSGTDFTLTISSLQPEDFATYYCQQYYYTPPTFGQGTKVEIKR

SEQ ID NO: 460 - protein, 108 aa, Artificial Sequence
  chemically synthesized
DIQMTQSPSSLSASVGDRVTITCRASQDVSTAVAWYQQKPGKAPKLLIYSASFLYSGVPSRFSGSGSGTDFTLTISSLQPEDFATYYCQQFFYTPPTFGQGTKVEIKR

SEQ ID NO: 461 - protein, 108 aa, Artificial Sequence
  chemically synthesized
DIQMTQSPSSLSASVGDRVTITCRASQDVSTAVAWYQQKPGKAPKLLIYSASFLYSGVPSRFSGSGSGTDFTLTISSLQPEDFATYYCQQSLFTPPTFGQGTKVEIKR

SEQ ID NO: 462 - protein, 108 aa, Artificial Sequence
  chemically synthesized
DIQMTQSPSSLSASVGDRVTITCRASQDVSTAVAWYQQKPGKAPKLLIYSASFLYSGVPSRFSGSGSGTDFTLTISSLQPEDFATYYCQQSLYTPPTFGQGTKVEIKR

SEQ ID NO: 463 - protein, 108 aa, Artificial Sequence
  chemically synthesized
DIQMTQSPSSLSASVGDRVTITCRASQDVSTAVAWYQQKPGKAPKLLIYSASFLYSGVPSRFSGSGSGTDFTLTISSLQPEDFATYYCQQSWYHPPTFGQGTKVEIKR

SEQ ID NO: 464 - protein, 108 aa, Artificial Sequence
  chemically synthesized
DIQMTQSPSSLSASVGDRVTITCRASQDVSTAVAWYQQKPGKAPKLLIYSASFLYSGVPSRFSGSGSGTDFTLTISSLQPEDFATYYCQQYFYIPPTFGQGTKVEIKR

SEQ ID NO: 465 - protein, 108 aa, Artificial Sequence
  chemically synthesized
DIQMTQSPSSLSASVGDRVTITCRASQDVSTAVAWYQQKPGKAPKLLIYSASFLYSGVPSRFSGSGSGTDFTLTISSLQPEDFATYYCQQYWYTPTTFGQGTKVEIKR

SEQ ID NO: 466 - protein, 108 aa, Artificial Sequence
  chemically synthesized
DIQMTQSPSSLSASVGDRVTITCRASQDVSTAVAWYQQKPGKAPKLLIYSASFLYSGVPSRFSGSGSGTDFTLTISSLQPEDFATYYCQQSYFIPPTFGQGTKVEIKR

SEQ ID NO: 467 - protein, 141 aa, Artificial Sequence
  chemically synthesized
METGLRWLLLVAVLKGVQCLSVEESGGRLVTPGTPLTLTCTASGFTITNYHMFWVRQAPGKGLEWIGVITSSGIGSSSTTYYATWAKGRFTISKTSTTVNLRITSPTTEDTATYFCARDYFTNTYYALDIWGPGTLVTVSS

SEQ ID NO: 468 - protein, 118 aa, Artificial Sequence
  chemically synthesized
QVQLVQSGAEVKKPGASVKVSCKASGYTFTSYDVHWVRQAPGQRLEWMGWLHADTGITKFSQKFQGRVTITRDTSASTAYMELSSLRSEDTAVYYCARERIQLWFDYWGQGTLVTVSS

SEQ ID NO: 469 - protein, 113 aa, Artificial Sequence
  chemically synthesized
EVQLVESGGGLVQPGRSLRLSCAVSGFTFDDYVVHWVRQAPGKGLEWVSGISGNSGNIGYADSVKGRFTISRDNAKNSLYLQMNSLRAEDTALYYCAVPFDYWGQGTLVTVSS

SEQ ID NO: 470 - protein, 116 aa, Artificial Sequence
  chemically synthesized
MDTRAPTQLLGLLLLWLPGARCALVMTQTPSSTSTAVGGTVTIKCQASQSISVYLAWYQQKPGQPPKLLIYSASTLASGVPSRFKGSRSGTEYTLTISGVQREDAATYYCLGSAGS

SEQ ID NO: 471 - protein, 120 aa, Artificial Sequence
  chemically synthesized
EVQLLESGGGLVQPGGSLRLSCAASGFTFSSYIMMWVRQAPGKGLEWVSSIYPSGGITFYADTVKGRFTISRDNSKNTLYLQMNSLRAEDTAVYYCARIKLGTVTTVDYWGQGTLVTVSS

SEQ ID NO: 472 - protein, 110 aa, Artificial Sequence
  chemically synthesized
QSALTQPASVSGSPGQSITISCTGTSSDVGGYNYVSWYQQHPGKAPKLMIYDVSNRPSGVSNRFSGSKSGNTASLTISGLQAEDEADYYCSSYTSSSTRVFGTGTKVTVL

SEQ ID NO: 473 - protein, 118 aa, Artificial Sequence
  chemically synthesized
EVKLQESGPSLVKPSQTLSLTCSVTGYSITSDYWNWIRKFPGNKLEYVGYISYTGSTYYNPSLKSRISITRDTSKNQYYLQLNSVTSEDTATYYCARYGGWLSPFDYWGQGTTLTVSS

SEQ ID NO: 474 - protein, 120 aa, Artificial Sequence
  chemically synthesized
EVQLQESGPGLVAPSQSLSITCTVSGFSLTTYSINWIRQPPGKGLEWLGVMWAGGGTNSNSVLKSRLIISKDNSKSQVFLKMNSLQTDDTARYYCARYYGNSPYYAIDYWGQGTSVTVSS

SEQ ID NO: 475 - protein, 118 aa, Artificial Sequence
  chemically synthesized
EVKLQESGPSLVKPSQTLSLTCSVTGYSIISDYWNWIRKFPGNKLEYLGYISYTGSTYYNPSLKSRISITRDTSKNQYYLQLNSVTTEDTATYYCARRGGWLLPFDYWGQGTTLTVSS

SEQ ID NO: 476 - protein, 118 aa, Artificial Sequence
  chemically synthesized
EVKLQESGPSLVKPGASVKLSCKASGYTFTSYDINWVKQRPGQGLEWIGWIFPRDNNTKYNENFKGKATLTVDTSSTTAYMELHSLTSEDSAVYFCTKENWVGDFDYWGQGTTLTLSS

SEQ ID NO: 477 - protein, 114 aa, Artificial Sequence
  chemically synthesized
EVQLQQSGPDLVTPGASVRISCQASGYTFPDYYMNWVKQSHGKSLEWIGDIDPNYGGTTYNQKFKGKAILTVDRSSSTAYMELRSLTSEDSAVYYCARGALTDWGQGTSLTVSS

SEQ ID NO: 478 - protein, 106 aa, Artificial Sequence
  chemically synthesized
EIVLTQSPATLSLSPGERATLSCRASSSVSYIYWFQQKPGQSPRPLIYAAFNRATGIPARFSGSGSGTDYTLTISSLEPEDFAVYYCQQWSNNPLTFGQGTKVEIK

SEQ ID NO: 479 - protein, 114 aa, Artificial Sequence
  chemically synthesized
QVQLVQSGAEVKKPGASVKVSCKASGYTFPDYYMNWVRQAPGQGLEWMGDIDPNYGGTNYAQKFQGRVTMTRDTSISTAYMELSRLRSDDTAVYYCARGALTDWGQGTMVTVSS

SEQ ID NO: 480 - protein, 114 aa, Artificial Sequence
  chemically synthesized
QVQLVQSGAEVKKPGASVKVSCKASGYTFPDYYMNWVRQAPGQSLEWMGDIDPNYGGTNYNQKFQGRVTMTRDTSISTAYMELSRLRSDDTAVYYCARGALTDWGQGTMVTVSS

SEQ ID NO: 481 - protein, 114 aa, Artificial Sequence
  chemically synthesized
EVQLVQSGAEVKKPGASVKVSCKASGYTFPDYYMNWVRQAPGQSLEWMGDIDPNYGGTNYNQKFQGRVTMTVDRSSSTAYMELSRLRSDDTAVYYCARGALTDWGQGTMVTVSS

SEQ ID NO: 482 - protein, 114 aa, Artificial Sequence
  chemically synthesized
EVQLVESGGGLVQPGRSLRLSCTASGYTFPDYYMNWVRQAPGKGLEWVGDIDPNYGGTTYAASVKGRFTISVDRSKSIAYLQMSSLKTEDTAVYYCTRGALTDWGQGTMVTVSS

SEQ ID NO: 483 - protein, 114 aa, Artificial Sequence
  chemically synthesized
EVQLVESGGGLVQPGRSLRLSCTASGYTFPDYYMNWVRQAPGKGLEWVGDIDPNYGGTTYNASVKGRFTISVDRSKSIAYLQMSSLKTEDTAVYYCARGALTDWGQGTMVTVSS

SEQ ID NO: 484 - protein, 107 aa, Artificial Sequence
  chemically synthesized
DIVMTQSHKLMSTSVGDRVSITCKASQDVGTAVAWYQQKPGQSPKLLIYWASTRHTGVPDRFTGSGSGTDFTLTISNVQSEDLADYFCQQDSSYPLTFGAGTKVELK

SEQ ID NO: 485 - protein, 107 aa, Artificial Sequence
  chemically synthesized
DIVTTQSHKLMSTSVGDRVSITCKASQDVGTAVAWYQQKPGQSPKLLIYWASTRHTGVPDRFTGSGSGTDFTLTISNVQSEDLADYFCQQDSSYPLTFGAGTKVELK

SEQ ID NO: 486 - protein, 113 aa, Artificial Sequence
  chemically synthesized
DIVMTQSPSSLAVSVGEKVSMGCKSSQSLLYSSNQKNSLAWYQQKPGQSPKLLIDWASTRESGVPDRFTGSGSGTDFTLTISSVKAEDLAVYYCQQYYGYPLTFGAGTKLELK

SEQ ID NO: 487 - protein, 106 aa, Artificial Sequence
  chemically synthesized
DIVMTQSPAIMSASPGEKVTMTCSASSSIRYMHWYQQKPGTSPKRWISDTSKLTSGVPARFSGSGSGTSYALTISSMEAEDAATYYCHQRSSYPWTFGGGTKLEIK

SEQ ID NO: 488 - protein, 106 aa, Artificial Sequence
  chemically synthesized
QIVLSQSPAILSASPGEKVTMTCRASSSVSYIYWFQQKPGSSPKPWIYATFNLASGVPARFSGSGSGTSYSLTISRVETEDAATYYCQQWSNNPLTFGAGTKLELK

SEQ ID NO: 489 - protein, 106 aa, Artificial Sequence
  chemically synthesized
EIVLTQSPATLSLSPGERATLSCRASSSVSYIYWFQQKPGQAPRLLIYAAFNRATGIPARFSGSGSGTDYTLTISSLEPEDFAVYYCQQWSNNPLTFGQGTKVEIK

SEQ ID NO: 490 - protein, 106 aa, Artificial Sequence
  chemically synthesized
QIVLTQSPATLSLSPGERATLSCRASSSVSYIYWFQQKPGQSPRPLIYATFNLASGIPARFSGSGSGTSYTLTISRLEPEDFAVYYCQQWSNNPLTFGQGTKVEIK

SEQ ID NO: 491 - protein, 106 aa, Artificial Sequence
  chemically synthesized
DIQLTQSPSSLSASVGDRVTITCRASSGVSYIYWFQQKPGKAPKLLIYAAFNLASGVPSRFSGSGSGTEYTLTISSLQPEDFATYYCQQWSNNPLTFGQGTKVEIK

SEQ ID NO: 492 - protein, 106 aa, Artificial Sequence
  chemically synthesized
DIQLTQSPSSLSASVGDRVTITCRASSGVSYIYWFQQKPGKAPKPLIYAAFNLASGVPSRFSGSGSGTEYTLTISSLQPEDFATYYCQQWSNNPLTFGQGTKVEIK

SEQ ID NO: 493 - protein, 106 aa, Artificial Sequence
  chemically synthesized
DIQLTQSPSILSASVGDRVTITCRASSSVSYIYWFQQKPGKAPKPLIYATFNLASGVPSRFSGSGSGTSYTLTISSLQPEDFATYYCQQWSNNPLTFGQGTKVEIK

SEQ ID NO: 494 - protein, 124 aa, Artificial Sequence
  chemically synthesized
QVQLVQSGAEVKKPGASVKVSCKASGYTFTSYGISWVRQAPGQGLEWMGWISAYNGNTNYAQKLQGRVTMTTDTSTSTAYMELRSLRSDDTAVYYCARALPSGTILVGGWFDPWGQGTLVTVSS

SEQ ID NO: 495 - protein, 124 aa, Artificial Sequence
  chemically synthesized
EVQLVQSGGGVVQPGRSLRLSCAASGFTFSSYALSWVRQAPGKGLEWVSAISGGGGSTYYADSVKGRFTISRDNSKNTLYLQMNSLRAEDTAVYYCAKDVFPETFSMNYGMDVWGQGTLVTVSS

SEQ ID NO: 496 - protein, 128 aa, Artificial Sequence
  chemically synthesized
QVQLVQSGGGVVQPGGSLRLSCAASGFTFDDYAMHWVRQAPGKGLEWVSLISGDGGSTYYADSVKGRFTISRDNSKNSLYLQMNSLRTEDTALYYCAKVLLPCSSTSCYGSVGAFDIWGQGTTVTVSS

SEQ ID NO: 497 - protein, 117 aa, Artificial Sequence
  chemically synthesized
QVQLVQSGGSVVRPGESLRLSCVASGFIFDNYDMSWVRQVPGKGLEWVSRVNWNGGSTTYADAVKGRFTISRDNTKNSLYLQMNNLRAEDTAVYYCVREFVGAYDLWGQGTTVTVSS

SEQ ID NO: 498 - protein, 121 aa, Artificial Sequence
  chemically synthesized
QVQLVQSGAEVKKPGATVKVSCKVFGDTFRGLYIHWVRQAPGQGLEWMGGIIPIFGTANYAQKFQGRVTITTDESTSTAYMELSSLRSEDTAVYYCASGLRWGIWGWFDPWGQGTLVTVSS

SEQ ID NO: 499 - protein, 121 aa, Artificial Sequence
  chemically synthesized
EVQLVQSGAELKKPGSSVKVSCKAFGGTFSDNAISWVRQAPGQGPEWMGGIIPIFGKPNYAQKFQGRVTITADESTSTAYMVLSSLRSEDTAVYYCARTMVRGFLGVMDVWGQGTTVTVSS

SEQ ID NO: 500 - protein, 125 aa, Artificial Sequence
  chemically synthesized
QVQLVQSGGGLVQPGGSLRLSCAASGFTFSSYAMSWVRQAPGKGLEWVSAISGSGGSTYYADSVKGRFTISRDNSKNTLYLQMNSLRAEDTAVYYCAKDQFVTIFGVPRYGMDVWGQGTTVTVSS

SEQ ID NO: 501 - protein, 120 aa, Artificial Sequence
  chemically synthesized
QVQLVQSGAEVKKPGSSVKVSCKASGGTFSSYAISWVRQAPGQGLEWMGGIIPIFGTANYAQKFQGRVTITADKSTSTAYMELSSLRSEDTAVYYCARGRQMFGAGIDFWGPGTLVTVSS

SEQ ID NO: 502 - protein, 118 aa, Artificial Sequence
  chemically synthesized
EVQLVESGAEVKKPGSSVKVSCKVSGGTFGTYALNWVRQAPGQGLEWMGRIVPLIGLVNYAHNFEGRISITADKSTGTAYMELSNLRSDDTAVYYCAREVYGGNSDYWGQGTLVTVSS

SEQ ID NO: 503 - protein, 120 aa, Artificial Sequence
  chemically synthesized
QVQLVQSGGEVKKPGASVKVSCKASGYTLSSHGITWVRQAPGQGLEWMGWISAHNGHASNAQKVEDRVTMTTDTSTNTAYMELRSLTADDTAVYYCARVHAALYYGMDVWGQGTLVTVSS

SEQ ID NO: 504 - protein, 121 aa, Artificial Sequence
  chemically synthesized
QVQLQESGGGVVQPGRSLRLSCSASGFTFSRHGMHWVRQAPGKGLEWVAVISHDGSVKYYADSMKGRFSISRDNSNNTLYLQMDSLRADDTAVYYCARGLSYQVSGWFDPWGQGTLVTVSS

SEQ ID NO: 505 - protein, 110 aa, Artificial Sequence
  chemically synthesized
NFMLTQPHSVSESPGKTVTISCTRSSGSIASNYVQWYQQRPGSSPTTVIYEDNQRPSGVPDRFSGSIDTSSNSASLTISGLKTKDEADYYCQSYDGITVIFGGGTKLTVL

SEQ ID NO: 506 - protein, 111 aa, Artificial Sequence
  chemically synthesized
NFMLTQPHSVSGSPGKTVTLPCTRSSGSIASHYVQWYQQRPGSAPTTVIYEDNKRPSGVPDRFSGSIDSSSNSASLSISGLKTEDEADYYCQSYDSSNRWVFGGGTKLTVL

SEQ ID NO: 507 - protein, 115 aa, Artificial Sequence
  chemically synthesized
LPVLTQPASLSASPGASASLTCTLRSGLNVGSYRIYWYQQKPGSRPQYLLNYKSDSNKQQASGVPSRFSGSKDASANAGILLISGLQSEDEADYYCMIWYSSAVVFGGGTKLTVL

SEQ ID NO: 508 - protein, 111 aa, Artificial Sequence
  chemically synthesized
NFMLTQPHSVSESPGKTVTISCTRSSGNIASNYVQWYQQRPGSAPTTVIYEDNQRPSGVPDRFSGSIDSSSNSASLTISGLKTEDEADYYCQSYDSSNLWVFGGGTKLTVL

SEQ ID NO: 509 - protein, 108 aa, Artificial Sequence
  chemically synthesized
SSELTQDPAVSVALGQTVRITCQGDSLRSYYASWYQQKPGQAPVLVIYGKNNRPSGIPDRFSGSSSGNTASLTITGAQAEDEADYYCNSRDSSGNHYVFGTGTKVTVL

SEQ ID NO: 510 - protein, 108 aa, Artificial Sequence
  chemically synthesized
LPVLTQAPSVSVAPGKTARITCGGSDIGRKSVHWYQQKPGQAPALVIYSDRDRPSGISERFSGSNSGNTATLTISRVEAGDEADYYCQVWDNNSDHYVFGAGTELIVL

SEQ ID NO: 511 - protein, 109 aa, Artificial Sequence
  chemically synthesized
QSALTQPASVSGSPGQSITISCTGTSSDVGGYNYVSWYQQHPGKAPKLMIYDVSNRPSGVSNRFSGSKSGNTASLTISGLQAEDEADYYCSSYTSSTLPFGGGTKLTVL

SEQ ID NO: 512 - protein, 107 aa, Artificial Sequence
  chemically synthesized
EIVLTQSPATLSLSPGERATLSCRASQSIGNSLAWYQQKPGQAPRLLMYGASSRATGIPDRFSGSGAGTDFTLTISSLEPEDFATYYCQQHTIPTFSFGPGTKVEVK

SEQ ID NO: 513 - protein, 107 aa, Artificial Sequence
  chemically synthesized
DIVMTQTPSFLSASIGDRVTITCRASQGIGSYLAWYQQRPGEAPKLLIYAASTLQSGVPSRFSGSGSGTDFTLTISNLQPEDFATYYCQQLNNYPITFGQGTRLEIK

SEQ ID NO: 514 - protein, 105 aa, Artificial Sequence
  chemically synthesized
QSALTQPPSVSVSPGQTANIPCSGDKLGNKYAYWYQQKPGQSPVLLIYQDIKRPSRIPERFSGSNSADTATLTISGTQAMDEADYYCQTWDNSVVFGGGTKLTVL

SEQ ID NO: 515 - protein, 112 aa, Artificial Sequence
  chemically synthesized
NFMLTQPHSVSESPGKTVTISCTRSSGSIDSNYVQWYQQRPGSAPTTVIYEDNQRPSGVPDRFSGSIDSSSNSASLTISGLKTEDEADYYCQSYDSNNRHVIFGGGTKLTVL

SEQ ID NO: 516 - protein, 110 aa, Artificial Sequence
  chemically synthesized
NFMLTQPHSVSESPGKTVTISCTRSSGNIGTNYVQWYQQRPGSAPVALIYEDYRRPSGVPDRFSGSIDSSSNSASLIISGLKPEDEADYYCQSYHSSGWEFGGGTKLTVL

SEQ ID NO: 517 - protein, 108 aa, Artificial Sequence
  chemically synthesized
QSVLTQPPSVSVAPGQTARITCGGNNIGSKGVHWYQQKPGQAPVLVVYDDSDRPSGIPERFSGSNSGNTATLTISRVEAGDEADYYCQVWDSSSDHWVFGGGTKLTVL

SEQ ID NO: 518 - protein, 111 aa, Artificial Sequence
  chemically synthesized
NFMLTQPHSVSESPGKTVTISCTRSSGSIASNYVQWYQQRPGSAPTTVIYEDNQRPSGVPDRFSGSIDSSSNSASLTISGLKTEDEADYYCQSYDSTTPSVFGGGTKLTVL

SEQ ID NO: 519 - protein, 120 aa, Artificial Sequence
  chemically synthesized
QVQLVQSGAEVKKPGASVKVSCKASGYTFTSYGISWVRQAPGQGLEWMGWTSPHNGLTAFAQILEGRVTMTTDTSTNTAYMELRNLTFDDTAVYFCAKVHPVFSYALDVWGQGTLVTVSS

SEQ ID NO: 520 - protein, 118 aa, Artificial Sequence
  chemically synthesized
EVQLVESGAEVMNPGSSVRVSCRGSGGDFSTYAFSWVRQAPGQGLEWMGRIIPILGIANYAQKFQGRVTITADKSTSTAYMELSSLRSDDTAVYYCARDGYGSDPVLWGQGTLVTVSS

SEQ ID NO: 521 - protein, 118 aa, Artificial Sequence
  chemically synthesized
EVQLVQSGAEVKKPGASVKVSCKASGYTFTNYGISWVRQAPGQGLEWMGWISAYNGNTNYAQKVQGRVTMTTDTSTSTGYMELRSLRSDDTAVYYCARGDFRKPFDYWGQGTLVTVSS

SEQ ID NO: 522 - protein, 115 aa, Artificial Sequence
  chemically synthesized
EVQLVQSGPELKKPGASVKMSCKASGYTFTSYVMHWVKQAPGQRLEWIGYVNPFNDGTKYNEMFKGRATLTSDKSTSTAYMELSSLRSEDSAVYYCARQAWGYPWGQGTLVTVSS

SEQ ID NO: 523 - protein, 115 aa, Artificial Sequence
  chemically synthesized
EVQLVQSGAEVKKPGASVKMSCKASGYTFTSYVMHWVKQAPGQRLEWIGYVNPFNDGTKYNEMFKGRATLTSDKSTSTAYMELSSLRSEDTAVYYCARQAWGYPWGQGTLVTVSS

SEQ ID NO: 524 - protein, 115 aa, Artificial Sequence
  chemically synthesized
EVQLVQSGAEVKKPGASVKMSCKASGYTFTSYVMHWVRQAPGQRLEWIGYVNPFNDGTKYNEMFKGRATLTSDKSTSTAYMELSSLRSEDTAVYYCARQAWGYPWGQGTLVTVSS

SEQ ID NO: 525 - protein, 115 aa, Artificial Sequence
  chemically synthesized
EVQLVQSGAEVKKPGASVKVSCKASGYTFTSYVMHWVRQAPGQRLEWIGYVNPFNDGTKYNEMFKGRATLTSDKSTSTAYMELSSLRSEDTAVYYCARQAWGYPWGQGTLVTVSS

SEQ ID NO: 526 - protein, 115 aa, Artificial Sequence
  chemically synthesized
EVQLVQSGAEVKKPGASVKVSCKASGYTFTSYVMHWVRQAPGQRLEWIGYVNPFNDGTKYNEMFKGRATITSDKSTSTAYMELSSLRSEDTAVYYCARQAWGYPWGQGTLVTVSS

SEQ ID NO: 527 - protein, 111 aa, Artificial Sequence
  chemically synthesized
DIVLTQSPASLALSPGERATLSCRATESVEYYGTSLVQWYQQKPGQPPKLLIYAASSVDSGVPSRFSGSGSGTDFTLTINSLEEEDAAMYFCQQSRRVPYTFGQGTKLEIK

SEQ ID NO: 528 - protein, 111 aa, Artificial Sequence
  chemically synthesized
DIVLTQSPATLSLSPGERATLSCRATESVEYYGTSLVQWYQQKPGQPPKLLIYAASSVDSGVPSRFSGSGSGTDFTLTINSLEAEDAAMYFCQQSRRVPYTFGQGTKLEIK

SEQ ID NO: 529 - protein, 111 aa, Artificial Sequence
  chemically synthesized
EIVLTQSPATLSLSPGERATLSCRATESVEYYGTSLVQWYQQKPGQPPKLLIYAASSVDSGVPSRFSGSGSGTDFTLTINSLEAEDAAMYFCQQSRRVPYTFGQGTKLEIK

SEQ ID NO: 530 - protein, 111 aa, Artificial Sequence
  chemically synthesized
DIVLTQSPATLSLSPGERATLSCRATESVEYYGTSLVQWYQQKPGQPPKLLIYAASSVDSGVPSRFSGSGSGTDFTLTINSLEAEDAATYFCQQSRRVPYTFGQGTKLEIK

SEQ ID NO: 531 - protein, 123 aa, Artificial Sequence
  chemically synthesized
EVQLVQSGAEVKKPGSSVKVSCKASGGTFSSYAISWVRQAPGQGLEWMGGIIPIFGTANYAQKFQGRVTITADKSTSTAYMELSSLRSEDTAVYYCAREGTIYDSSGYSFDYWGQGTLVTVSS

SEQ ID NO: 532 - protein, 124 aa, Artificial Sequence
  chemically synthesized
EVQLVQSGAEVKKPGSSVKVSCKASGGTFSSYAISWVRQAPGQGLEWMGIINPSGGSTSYAQKFQGRVSMTRDTSTSTVYMELSSLTSEDTAVYYCARDLFPHIYGNYYGMDIWGQGTTVTVSS

SEQ ID NO: 533 - protein, 118 aa, Artificial Sequence
  chemically synthesized
QVQLVQSGAEVKKPGSSVKVSCKASGGTFSSYAISWVRQAPGQGLEWMGGIIPIFGTANYAQKFQGRVTITADKSTSTAYMELSSLRSEDTAVYYCARLAVPGAFDIWGQGTMVTVSS

SEQ ID NO: 534 - protein, 116 aa, Artificial Sequence
  chemically synthesized
EVQLVESGGGVVQPGRSLRLSCAASGFTFSSYAMHWVRQAPGKGLAVISYDGSNKYYADSVKGRFTISRDNSKNTLYLQMNSLRAEDTAVYYCARGQWLVTELDYWGQGTLVTVSS

SEQ ID NO: 535 - protein, 122 aa, Artificial Sequence
  chemically synthesized
EVQLVESGSEVEKPGSSVKVSCKASGGTFSDSGISWVRQAPGQGLEWMGGIIPMFATPYYAQKFQDRVTITADESTSTVYMELSGLRSDDTAVFYCARDRGRGHLPWYFDLWGRGTLVTVSS

SEQ ID NO: 536 - protein, 119 aa, Artificial Sequence
  chemically synthesized
EVQLVESGAEVKKPGSSVKVSCKASGGTFSSYAISWVRQAPGQGLEWMGGIIPIFGTANYAQKFQGRVTITADESTSTAYMELSSLRSEDTAVYYCARAPYYYYYMDVWGQGTTVTVSS

SEQ ID NO: 537 - protein, 124 aa, Artificial Sequence
  chemically synthesized
EVQLLESGAEVKKPGSSVKVSCKASGGTLSRYALSWVRQAPGQGPEWVGAIIPIFGTPHYSKKFQDRVIITVDTSTNTAFMELSSLRFEDTALYFCARGHDEYDISGYHRLDYWGQGTLVTVSS

SEQ ID NO: 538 - protein, 121 aa, Artificial Sequence
  chemically synthesized
QVQLVQSGSELKKPGSSVKVSCKASGYSFSGYYIHWVRQAPGQGLEWMGWIDPNSGVTNYVRRFQGRVTMTRDTSLSTAYMELSGLTADDTAVYYCARDENLWQFGYLDYWGQGTLVTVSS

SEQ ID NO: 539 - protein, 120 aa, Artificial Sequence
  chemically synthesized
QVQLVQSGAEVKKPGSSVKVSCKASGGTFSRYGVHWVRQAPGQGLEWMGRLIPIVSMTNYAQKFQDRVSITTDKSTGTAYMELRSLTSEDTALYYCASVGQQLPWVFFAWGQGTLVTVSS

SEQ ID NO: 540 - protein, 118 aa, Artificial Sequence
  chemically synthesized
QVQLVESGGGVVQPGRSLRLSCAASGFTFSSYAMHWVRQAPGKGLEWVAVISFDGSNKYYADSVRGRFTISRDNSKNTLYLQMNSLRTEDTAVYYCARGWLDRDIDYWGQGTLVTVSS

SEQ ID NO: 541 - protein, 118 aa, Artificial Sequence
  chemically synthesized
EVQLVESGGGVVQPGRSLRLSCAASGFTFSSYAMHWVRQAPGKGLEWVAVISFDGSNKYYADSVRGRFTISRDNSKNTLYLQMNSLRTEDTAVYYCARGWLDRDIDYWGQGTLVTVSS

SEQ ID NO: 542 - protein, 121 aa, Artificial Sequence
  chemically synthesized
EVQLVQSGGGLVQPGGSLRLSCAASGFTFSDYGMHWVRQPPGKGLEWLAVISYDGSYKIHADSVQGRFTISRDNAKNSVFLQMNSLKTEDTAVYYCTTDRKWLAWHGMDVWGQGTTVTVSS

SEQ ID NO: 543 - protein, 118 aa, Artificial Sequence
  chemically synthesized
EVQLVQSGAEVKKPGSSVKVSCKASGGTFSSYAISWVRQAPGQGLEWMGGIIPIFGTANYAQKFQGRVTITADESTSTAYMELSSLRSEDTAVYYCARDGIVADFQHWGQGTLVTVSS

SEQ ID NO: 544 - protein, 121 aa, Artificial Sequence
  chemically synthesized
EVQLVESGAEVKKPGASVKVSCKASGDTFSRYGITWVRQAPGRGLEWMGNIVPFFGATNYAQKFQGRLTITADKSSYTSYMDLSSLRSDDTAVYYCARDHFYGSGGYFDYWGQGTLVTVSS

SEQ ID NO: 545 - protein, 121 aa, Artificial Sequence
  chemically synthesized
EVQLLESGAEVKKPGASVKVSCKASGYTFNSYDINWVRQAPGQGLEWMGGIIPVFGTANYAESFQGRVTMTADHSTSTAYMELNNLRSEDTAVYYCARDRWHYESRPMDVWGQGTTVTVSS

SEQ ID NO: 546 - protein, 119 aa, Artificial Sequence
  chemically synthesized
EVQLVESGGGLVRPGGSLRLACAASGFSFSDYYMTWIRQAPGRGLEWIAYISDSGQTVHYADSVKGRFTISRDNTKNSLFLQVNTLRAEDTAVYYCAREDLLGYYLQSWGQGTLVTVSS

SEQ ID NO: 547 - protein, 131 aa, Artificial Sequence
  chemically synthesized
QVQLQQSGPGLVKPSQTLSLTCAISGDSVSSNSAAWNWIRQSPSRGLEWLGRTYYRSKWYNDYAVSVKSRITINPDTSKNQFSLQLNSVTPEDTAVYYCARDEPRAVAGSQAYYYYGMDVWGQGTTVTVSS

SEQ ID NO: 548 - protein, 124 aa, Artificial Sequence
  chemically synthesized
EVQLVQSGAEVKKPGASVKVSCKASGYTFTSYYMHWVRQAPGQGLEWMGIINPSDGSTSYAQKFQGRVTMTRDTSTSTVHMELSSLRSEDTAVYYCARDLFPHIYGNYYGMDIWGQGTTVTVSS

SEQ ID NO: 549 - protein, 118 aa, Artificial Sequence
  chemically synthesized
QMQLVQSGGGVVQPGRSLRLSCAASGFTFSSYAMHWVRQAPGKGLEWVAVISFDGSNKYYADSVRGRFTISRDNSKNTLYLQMNSLRTEDTAVYYCARGWLDRDIDYWGQGTLVTVSS

SEQ ID NO: 550 - protein, 118 aa, Artificial Sequence
  chemically synthesized
QVQLVQSGGGVVQPGRSLRLSCAASGFTFSSYAMHWVRQAPGKGLEWVAVISFDGSNKYYADSVRGRFTISRDNSKNTLYLQMNSLRTEDTAVYYCARGWLDRDIDYWGQGTLVTVSS

SEQ ID NO: 551 - protein, 110 aa, Artificial Sequence
  chemically synthesized
QSVLTQPPSVSAAPGQKVTISCSGNNSNIANNYVSWYQQLPGTAPKLLIYDNNYRPSGIPDRFSGSKSGTSATLDITGLQTGDEADYYCGVWDGSLTTGVFGGGTKLTVL

SEQ ID NO: 552 - protein, 107 aa, Artificial Sequence
  chemically synthesized
AIQMTQSPSSLSASVGDRVTITCRASQGISNYLAWYQQKPGKVPKLLIYAASTLESGVPSRFSGSGSGTDFTLTISSLQPEDLATYYCQQLHTFPLTFGGGTKVEIK

SEQ ID NO: 553 - protein, 111 aa, Artificial Sequence
  chemically synthesized
QPVLTQPPSASGSPGQSVTISCTGTSSDVGAYNFVSWYRQHPGKAPKLMIYEVNKRPSGVPDRFSGSKSGNTASLTVSGLQAEDEADYYCSSYAGTNSLGIFGTGTKLTVL

SEQ ID NO: 554 - protein, 111 aa, Artificial Sequence
  chemically synthesized
QSVVTQPPSVSAAPGQKVTISCSGSSSDIGNHYVSWYQQLPGTAPKLLIYDNNQRPSGIPDRFSGSKSGTSATLAITGLQTGDEADYYCGTWDNSLSPHLLFGGGTKLTVL

SEQ ID NO: 555 - protein, 110 aa, Artificial Sequence
  chemically synthesized
QSVLTQPPSVSAAPGQKVTISCSGSSSNMGNNYVSWYKQVPGTAPKLLIYENDKRPSGIPDRFSGSKSGTSATLGITGLQTGDEADYYCGTWDNSLSGFVFASGTKVTVL

SEQ ID NO: 556 - protein, 109 aa, Artificial Sequence
  chemically synthesized
QSALTQPASVSGSLGQSVTISCTGSSSDVGSYNLVSWYQQHPGKAPNLMIYDVSKRSGVSNRFSGSKSGNTASLTISGLQAEDEADYYCSSYTGISTVVFGGGTKLTVL

SEQ ID NO: 557 - protein, 110 aa, Artificial Sequence
  chemically synthesized
QSVLTQPASVSGSPGQSITISCTGTSSDVGSYNLVSWYQQHPGKAPKLMIYEVSKRPSGVSNRFSGSKSGNTASLTISGLQAEDEADYYCSSYGGFNNLLFGGGTKLTVL

SEQ ID NO: 558 - protein, 107 aa, Artificial Sequence
  chemically synthesized
DIVMTQSPSSLSASIGDRVTITCRASQRISAYVNWYQQKPGKAPKVLIYAASSLRSGVPSRFSGSGSGTDFTLTISSLQPEDFATYYCQQTYSSPWTFGQGTKVEIK

SEQ ID NO: 559 - protein, 112 aa, Artificial Sequence
  chemically synthesized
QSVLTQPPSASGSPGQSVTISCTGTSSDIGGYDSVSWYQQHPGKAPKLMIYDVSKRPSGVSNRFSGSKSGNTASLTISGLQAEDEADYYCSSYTSSSIFFYVFGTGTKVTVL

SEQ ID NO: 560 - protein, 110 aa, Artificial Sequence
  chemically synthesized
LPVLTQPASVSGSPGQSITISCTGTTSDIGGYDYVSWYQQHPGKAPKLMIYDVSKRPSGVSNRFSGSKSGNTASLTISGLQAEDEADYYCSSYTSSSTHVFGTGTKLTVL

SEQ ID NO: 561 - protein, 111 aa, Artificial Sequence
  chemically synthesized
QSALTQPASVSGSPGQSITISCTGTSSDVGGYNYVSWYQQHPGKAPKLMIYDVSNRPSGVSNRFSGSKSGNTASLTISGLQAEDEADYYCSSYRSSTLGPVFGGGTKLTVL

SEQ ID NO: 562 - protein, 110 aa, Artificial Sequence
  chemically synthesized
QAGLTQPPSVSEAPRQRVTISCSGSSSNIGNNAVNWYQQLPGKAPKLLIYYDDLLPSGVSDRFSGSKSGTSASLAISGLQSEDEADYYCAAWDDSLNGYVFGTGTKLTVL

SEQ ID NO: 563 - protein, 110 aa, Artificial Sequence
  chemically synthesized
QSALTQPRSVSGSPGQSVTISCTGTSSDVGGYNYVSWYQQHPGKAPKLMIYDVSKRPSGVPDRFSGSKSGNTASLTISGLQAEDEADYYCSSYTSSTTHVFGTGTKVTVL

SEQ ID NO: 564 - protein, 110 aa, Artificial Sequence
  chemically synthesized
QSVVTQPPSVSAAPGQKVTISCSGSSSNIGNNYVSWYQQLPGTAPKLLIYDNNKRPSGIPDRFSGSKSGTSATLGITGLQTGDEADYYCGTWDSSLSVWVFGGGTQLTVL

SEQ ID NO: 565 - protein, 112 aa, Artificial Sequence
  chemically synthesized
QSVLTQPASVSGSPGQSITISCTGTSSDVGGYNYVSWYQQHPGRAPRLMIYDVSNRPSGVSNRFSGSKSGNTASLTISGLQAEDEGDYYCSSYTSGGTLGPVFGGGTKLTVL

SEQ ID NO: 566 - protein, 110 aa, Artificial Sequence
  chemically synthesized
QAGLTQPPSASGTPGQRVTISCSGSSSNIGSNTVNWYQQLPGTAPKLLIYSNNQRPSGVPDRFSGSKSGTSASLAISGLQSEDEADYYCAAWDDSLNGWVFGGGTKLTVL

SEQ ID NO: 567 - protein, 107 aa, Artificial Sequence
  chemically synthesized
AIRMTQSPSSLSASVGDRVTITCRASQSISNYLNWYQQRPGKAPNLLIYAASSLQSGVPSRFSGSGSGTDFTLTISSLQPEDFATYYCQQTYSTPYTFGQGTKLEIK

SEQ ID NO: 568 - protein, 111 aa, Artificial Sequence
  chemically synthesized
QSVLTQPASVSGSPGQSITISCTGTSSDVGGYNYVSWYRQHPGKAPKLMIYDVSYRPSGVSNRFSGSKSGNTASLTISGLQAEDEADYYCSSYTDSSTRYVFGTGTKLTVL

SEQ ID NO: 569 - protein, 110 aa, Artificial Sequence
  chemically synthesized
QPVLTQPPSASGTPGQRVAISCSGSRSNIEINSVNWYQQLPGTAPKLLIYDNNKRPSGIPDRFSGSKSGTSATLGITGLQTGDEADYYCGSWDSSLSADVFGTGTKLTVL

SEQ ID NO: 570 - protein, 110 aa, Artificial Sequence
  chemically synthesized
QSVLTQPPSVSAAPGKKVTISCSGSSSNIGNNYVSWYQQLPGTAPKLLIYRNNQRPSGVPDRFSGSKSGTSASLAISGLQSEDEADYYCATWDDSLNGWVFGGGTKLTVL

SEQ ID NO: 571 - protein, 111 aa, Artificial Sequence
  chemically synthesized
QSVVTQPPSVSGAPGQRVTISCTGSSSNIGAGYDVHWYQQLPGTAPKLLIYGNNNRHSGVPDRFSGSKSGTSASLAITGLQAEDEAEFFCGTWDSRLTTYVFGSGTKLTVL

SEQ ID NO: 572 - protein, 110 aa, Artificial Sequence
  chemically synthesized
QSVVTQPPSVSAAPGQKVTISCSGSSSNIGNNYVSWYQQLPGTAPKLLIYDNNKRPSGIPDRFSGSKSGTSATLGITGLQTGDEADYYCGTWDSSLSAVVFGGGTKLTVL

SEQ ID NO: 573 - protein, 103 aa, Artificial Sequence
  chemically synthesized
VIWMTQSPSSLSASVGDRVTITCAASSLQSWYQQKPGKAPKLLIYEASTLESGVPSRFSGSGSGTEFTLTISSLQPEDFATYYCQQSYSTPYTFGQGTKLEIK

SEQ ID NO: 574 - protein, 110 aa, Artificial Sequence
  chemically synthesized
QSVVTQPPSVSAAPGQKVTISCSGSSSNIGNNYVSWYQQVPGTAPKLLIYDNNKRPSGIPDRFSGSNSDTSATLGITGLQTGDEADYYCGTWDSSLSAWVFGGGTKLTVL

SEQ ID NO: 575 - protein, 112 aa, Artificial Sequence
  chemically synthesized
QSVVTQPPSVSAAPGQKVTISCSGSSSNIGNNYVSWYQQLPGTAPKLLIYDNNKRPSGIPDRFSGSKSGTSATLGITGLQTGDEADYYCGTWDSSLSAGSVVFGGGTKLTVL

SEQ ID NO: 576 - protein, 108 aa, Artificial Sequence
  chemically synthesized
SYELMQPPSVSVAPGKTATIACGGENIGRKTVHWYQQKPGQAPVLVIYYDSDRPSGIPERFSGSNSGNTATLTISRVEAGDEADYYCLVWDSSSDHRIFGGGTKLTVL

SEQ ID NO: 577 - protein, 108 aa, Artificial Sequence
  chemically synthesized
SYELMQPPSVSVAPGKTATIACGGENIGRKTVHWYQQKPGQAPVLVIYYDSDRPSGIPERFSGSNSGNTATLTISRVEAGDEADYYCQVWDSSSDHRIFGGGTKLTVL

SEQ ID NO: 578 - protein, 108 aa, Artificial Sequence; identical to SEQ ID NO: 577
  chemically synthesized

SEQ ID NO: 579 - protein, 108 aa, Artificial Sequence; identical to SEQ ID NO: 577
  chemically synthesized

SEQ ID NO: 580 - protein, 447 aa, Artificial Sequence
  chemically synthesized
QVQLVQSGVEVKKPGASVKVSCKASGYTFTNYYMYWVRQAPGQGLEWMGGINPSNGGTNFNEKFKNRVTLTTDSSTTTAYMELKSLQFDDTAVYYCARRDYRFDMGFDYWGQGTTVTVSSASTKGPSVFPLAPCSRSTSESTAALGCLVKDYFPEPVTVSWNSGALTSGVHTFPAVLQSSGLYSLSSVVTVPSSSLGTKTYTCNVDHKPSNTKVDKRVESKYGPPCPPCPAPEFLGGPSVFLFPPKPKDTLMISRTPEVTCVVVDVSQEDPEVQFNWYVDGVEVHNAKTKPREEQFNSTYRVVSVLTVLHQDWLNGKEYKCKVSNKGLPSSIEKTISKAKGQPREPQVYTLPPSQEEMTKNQVSLTCLVKGFYPSDIAVEWESNGQPENNYKTTPPVLDSDGSFFLYSRLTVDKSRWQEGNVFSCSVMHEALHNHYTQKSLSLSLGK

SEQ ID NO: 581 - protein, 440 aa, Artificial Sequence
  chemically synthesized
QVQLVESGGGVVQPGRSLRLDCKASGITFSNSGMHWVRQAPGKGLEWVAVIWYDGSKRYYADSVKGRFTISRDNSKNTLFLQMNSLRAEDTAVYYCATNDDYWGQGTLVTVSSASTKGPSVFPLAPCSRSTSESTAALGCLVKDYFPEPVTVSWNSGALTSGVHTFPAVLQSSGLYSLSSVVTVPSSSLGTKTYTCNVDHKPSNTKVDKRVESKYGPPCPPCPAPEFLGGPSVFLFPPKPKDTLMISRTPEVTCVVVDVSQEDPEVQFNWYVDGVEVHNAKTKPREEQFNSTYRVVSVLTVLHQDWLNGKEYKCKVSNKGLPSSIEKTISKAKGQPREPQVYTLPPSQEEMTKNQVSLTCLVKGFYPSDIAVEWESNGQPENNYKTTPPVLDSDGSFFLYSRLTVDKSRWQEGNVFSCSVMHEALHNHYTQKSLSLSLGK

SEQ ID NO: 582 - protein, 218 aa, Artificial Sequence
  chemically synthesized
EIVLTQSPATLSLSPGERATLSCRASKGVSTSGYSYLHWYQQKPGQAPRLLIYLASYLESGVPARFSGSGSGTDFTLTISSLEPEDFAVYYCQHSRDLPLTFGGGTKVEIKRTVAAPSVFIFPPSDEQLKSGTASVVCLLNNFYPREAKVQWKVDNALQSGNSQESVTEQDSKDSTYSLSSTLTLSKADYEKHKVYACEVTHQGLSSPVTKSFNRGEC

SEQ ID NO: 583 - protein, 214 aa, Artificial Sequence
  chemically synthesized
EIVLTQSPATLSLSPGERATLSCRASQSVSSYLAWYQQKPGQAPRLLIYDASNRATGIPARFSGSGSGTDFTLTISSLEPEDFAVYYCQQSSNWPRTFGQGTKVEIKRTVAAPSVFIFPPSDEQLKSGTASVVCLLNNFYPREAKVQWKVDNALQSGNSQESVTEQDSKDSTYSLSSTLTLSKADYEKHKVYACEVTHQGLSSPVTKSFNRGEC

SEQ ID NO: 584 - protein, 17 aa, Artificial Sequence
  chemically synthesized
  MISC_FEATURE (8)..(8): X is H or N
  MISC_FEATURE (9)..(9): X is S or T
  MISC_FEATURE (10)..(10): X is R or S
KSSQSLLXXXTRKNYLA

SEQ ID NO: 585 - protein, 290 aa, Artificial Sequence
  chemically synthesized
MRIFAVFIFMTYWHLLNAFTVTVPKDLYVVEYGSNMTIECKFPVEKQLDLAALIVYWEMEDKNIIQFVHGEEDLKVQHSSYRQRARLLKDQLSLGNAALQITDVKLQDAGVYRCMISYGGADYKRITVKVNAPYNKINQRILVVDPVTSEHELTCQAEGYPKAEVIWTSSDHQVLSGKTTTTNSKREEKLFNVTSTLRINTTTNEIFYCTFRRLDPEENHTAELVIPELPLAHPPNERTHLVILGAILLCLGVALTFIFRLRKGRMMDVKKCGIQDTNSKKQSDTHLEET

SEQ ID NO: 586 - protein, 290 aa, Artificial Sequence
  chemically synthesized
MRIFAGIIFTACCHLLRAFTITAPKDLYVVEYGSNVTMECRFPVERELDLLALVVYWEKEDEQVIQFVAGEEDLKPQHSNFRGRASLPKDQLLKGNAALQITDVKLQDAGVYCCIISYGGADYKRITLKVNAPYRKINQRISVDPATSEHELICQAEGYPEAEVIWTNSDHQPVSGKRSVTTSRTEGMLLNVTSSLRVNATANDVFYCTFWRSQPGQNHTAELIIPELPATHPPQNRTHWVLLGSILLFLIVVSTVLLFLRKQVRMLDVEKCGVEDTSSKNRNDTQFEET

SEQ ID NO: 587 - protein, 288 aa, Artificial Sequence
  chemically synthesized
MRIFAVFIFMTYWHLLNAFTVTVPKDLYVVEYGSNMTIECKFPVEKQLDLAALIVYWEMEDKNIIQFVHGEEDLKVQHSSYRQRARLLKDQLSLGNAALQITDVKLQDAGVYRCMISYGGADYKRITVKVNAPYNKINQRILVVDPVTSEHELTCQAEGYPKAEVIWTSSDHQVLSGKTTTTNSKREEKLFNVTSTLRINTTTNEIFYCTFRRLDPEENHTAELVIPELPLAHPPNERTHLVILGAILLCLGVALTFIFRLRKGRMMDVKCGIQDTNSKQSDTHLEET

SEQ ID NO: 588 - protein, 221 aa, Artificial Sequence [sequence omitted]

SEQ ID NO: 589 - protein, 7 aa, Artificial Sequence
  chemically synthesized
WASTRES

SEQ ID NO: 590 - protein, 8 aa, Artificial Sequence
  chemically synthesized
  MISC_FEATURE (1)..(1): X is Q or K
XQSYDVVT

SEQ ID NO: 591 - protein, 5 aa, Artificial Sequence
  chemically synthesized
  MISC_FEATURE (4)..(4): X is I or M
SYWXH

SEQ ID NO: 592 - protein, 17 aa, Artificial Sequence
  chemically synthesized
  MISC_FEATURE (7)..(7): X is D or G
  MISC_FEATURE (9)..(9): X is H or N
  MISC_FEATURE (12)..(12): X is S or N
  MISC_FEATURE (13)..(13): X is E or Q
  MISC_FEATURE (16)..(16): X is I or M
YINPSSXYXEYXXKFXD

SEQ ID NO: 593 - protein, 13 aa, Artificial Sequence
  chemically synthesized
  MISC_FEATURE (5)..(5): X is I or V
  MISC_FEATURE (13)..(13): X is F or Y
SGWLXHGDYYFDX

SEQ ID NO: 594 - protein, 17 aa, Artificial Sequence
  chemically synthesized
KSSQSLLNSRTRKNYLA

SEQ ID NO: 595 - protein, 8 aa, Artificial Sequence
  chemically synthesized
QQSYDVVT

SEQ ID NO: 596 - protein, 5 aa, Artificial Sequence
  chemically synthesized
SYWMH

SEQ ID NO: 597 - protein, 17 aa, Artificial Sequence
  chemically synthesized
YINPSSDYNEYSEKFMD

SEQ ID NO: 598 - protein, 13 aa, Artificial Sequence
  chemically synthesized
SGWLVHGDYYFDY

SEQ ID NO: 599 - protein, 17 aa, Artificial Sequence
  chemically synthesized
KSSQSLLHTSTRKNYLA

SEQ ID NO: 600 - protein, 8 aa, Artificial Sequence
  chemically synthesized
KQSYDVVT

SEQ ID NO: 601 - protein, 10 aa, Artificial Sequence
  chemically synthesized
GYIFTSYWMH

SEQ ID NO: 602 - protein, 17 aa, Artificial Sequence
  chemically synthesized
YINPSSGYHEYNQKFID

SEQ ID NO: 603 - protein, 13 aa, Artificial Sequence
  chemically synthesized
SGWLIHGDYYFDF

SEQ ID NO: 604 - protein, 5 aa, Artificial Sequence
  chemically synthesized
SYWIH

SEQ ID NO: 605 - protein, 10 aa, Artificial Sequence
  chemically synthesized
GTTFTSYWIH

SEQ ID NO: 606 - protein, 14 aa, Artificial Sequence
  chemically synthesized
  MISC_FEATURE (4)..(4): X is N or S
  MISC_FEATURE (5)..(5): X is T, R, or S
  MISC_FEATURE (9)..(9): X is A or G
TGTXXDVGXYNYVS

SEQ ID NO: 607 - protein, 7 aa, Artificial Sequence
  chemically synthesized
  MISC_FEATURE (1)..(1): X is E or D
  MISC_FEATURE (3)..(3): X is I, N, or D
  MISC_FEATURE (4)..(4): X is D, H, or N
XVXXRPS

SEQ ID NO: 608 - protein, 10 aa, Artificial Sequence
  chemically synthesized
  MISC_FEATURE (3)..(3): X is F or Y
  MISC_FEATURE (5)..(5): X is N or S
  MISC_FEATURE (6)..(6): X is R, T, or S
  MISC_FEATURE (7)..(7): X is G or S
  MISC_FEATURE (8)..(8): X is I or T
SSXTXXXXRV

SEQ ID NO: 609 - protein, 5 aa, Artificial Sequence
  chemically synthesized
  MISC_FEATURE (1)..(1): X is K, R, T, Q, G, A, W, M, I, or S
  MISC_FEATURE (3)..(3): X is V, R, K, L, M, or I
  MISC_FEATURE (5)..(5): X is H, T, N, Q, A, V, Y, W, F, or M
XYXMX

SEQ ID NO: 610 - protein, 17 aa, Artificial Sequence
  chemically synthesized
  MISC_FEATURE (8)..(8): X is F or I
  MISC_FEATURE (14)..(14): X is S or T
SIYPSGGXTFYADXVKG

SEQ ID NO: 611 - protein, 11 aa, Artificial Sequence
  chemically synthesized
  MISC_FEATURE (10)..(10): X is E or D
IKLGTVTTVXY

SEQ ID NO: 612 - protein, 14 aa, Artificial Sequence
  chemically synthesized
TGTSSDVGGYNYVS

SEQ ID NO: 613 - protein, 7 aa, Artificial Sequence
  chemically synthesized
DVSNRPS

SEQ ID NO: 614 - protein, 10 aa, Artificial Sequence
  chemically synthesized
SSYTSSSTRV

SEQ ID NO: 615 - protein, 5 aa, Artificial Sequence
  chemically synthesized
SYIMM

SEQ ID NO: 616 - protein, 3 aa, Artificial Sequence
  chemically synthesized
SGQ

SEQ ID NO: 617 - protein, 17 aa, Artificial Sequence
  chemically synthesized
SIYPSGGITFYADTVKG

SEQ ID NO: 618 - protein, 11 aa, Artificial Sequence
  chemically synthesized
IKLGTVTTVDY

SEQ ID NO: 619 - protein, 5 aa, Artificial Sequence
  chemically synthesized
MYMMM

SEQ ID NO: 620 - protein, 17 aa, Artificial Sequence
  chemically synthesized
SIYPSGGITFYADSVKG

SEQ ID NO: 621 - protein, 14 aa, Artificial Sequence
  chemically synthesized
TGTSSDVGAYNYVS

SEQ ID NO: 622 - protein, 12 aa, Artificial Sequence
  chemically synthesized
  MISC_FEATURE (1)..(1): X is R, S, or K
  MISC_FEATURE (2)..(2): X is A or S
  MISC_FEATURE (4)..(4): X is R, N, D, Q, E, H, K, M, or S
  MISC_FEATURE (5)..(5): X is SLLYSS or Absent
  MISC_FEATURE (6)..(6): X is N, D, or Absent
  MISC_FEATURE (7)..(7): X is A, Q, E, L, K, M, P, S, T, Y, or V
  MISC_FEATURE (8)..(8): X is any amino acid
  MISC_FEATURE (9)..(9): X is R, N, S, or T
  MISC_FEATURE (10)..(10): X is A, R, N, C, Q, E, H, I, L, K, M, F, S, T, Y, or V
  MISC_FEATURE (11)..(11): X is I, L, M, or V
  MISC_FEATURE (12)..(12): X is A, R, N, Q, E, H, I, K, M, F, S, T, or Y
XXSXXXXXXXXX

SEQ ID NO: 623 - protein, 6 aa, Artificial Sequence
  chemically synthesized
  MISC_FEATURE (1)..(1): X is any amino acid
  MISC_FEATURE (2)..(2): X is A, C, G, S, T, or V
  MISC_FEATURE (3)..(3): X is A, C, H, I, L, M, F, S, T, Y, or V
  MISC_FEATURE (4)..(4): X is R, N, D, Q, E, K, S, or T
  MISC_FEATURE (5)..(5): X is A, R, N, D, Q, E, G, H, K, M, F, P, S, T, or Y
  MISC_FEATURE (6)..(6): X is A, N, S, or T
XXXXXX

SEQ ID NO: 624 - protein, 9 aa, Artificial Sequence
  chemically synthesized
  MISC_FEATURE (1)..(1): X is R, N, Q, E, or H
  MISC_FEATURE (3)..(3): X is any amino acid
  MISC_FEATURE (4)..(4): X is A, R, N, C, Q, E, H, I, L, K, M, F, S, T, Y, or V
  MISC_FEATURE (5)..(5): X is N, G, or S
  MISC_FEATURE (6)..(6): X is A, R, N, D, C, Q, E, G, H, I, L, K, M, F, R, S, T, W, Y, or V
  MISC_FEATURE (8)..(8): X is A, R, N, D, Q, E, G, H, K, M, P, S, T, or Y
XQXXXXPXT

SEQ ID NO: 625 - protein, 10 aa, Artificial Sequence
  chemically synthesized
  MISC_FEATURE (2)..(2): X is Y or F
  MISC_FEATURE (3)..(3): X is T or S
  MISC_FEATURE (4)..(4): X is I, L, M, or F
  MISC_FEATURE (5)..(5): X is A, R, N, D, C, Q, E, H, I, L, K, M, P, S, T, W, Y, or V
  MISC_FEATURE (6)..(6): X is N, D, Q, E, K, P, S, or T
  MISC_FEATURE (7)..(7): X is A, R, N, D, C, Q, E, G, H, I, L, K, M, F, P, S, T, Y, or V
  MISC_FEATURE (8)..(8): X is A, R, N, D, C, Q, E, G, H, I, L, K, M, F, P, S, T, Y, or V
  MISC_FEATURE (9)..(9): X is A, R, C, Q, E, H, I, L, K, M, F, S, T, W, Y, or V
GXXXXXXXXN

SEQ ID NO: 626 - protein, 17 aa, Artificial Sequence
  chemically synthesized
  MISC_FEATURE (1)..(1): X is any amino acid
  MISC_FEATURE (2)..(2): X is I, L, M, F, or V
  MISC_FEATURE (3)..(3): X is any amino acid
  MISC_FEATURE (4)..(4): X is P or Absent
  MISC_FEATURE (5)..(5): X is A, R, N, Q, E, H, K, M, S, T, Y, or V
  MISC_FEATURE (6)..(6): X is A, R, N, D, C, Q, E, G, H, K, M, F, P, S, T, Y, or V
  MISC_FEATURE (7)..(7): X is N, G, or S
  MISC_FEATURE (8)..(8): X is N, G, or S
  MISC_FEATURE (10)..(10): X is A, R, N, Q, E, H, K, M, S, T, or Y
  MISC_FEATURE (11)..(11): X is A, R, N, C, Q, E, H, I, L, K, M, F, S, T, W, Y, or V
  MISC_FEATURE (13)..(13): X is A, D, Q, E, K, P, S, or T
  MISC_FEATURE (14)..(14): X is A, R, N, D, C, Q, E, G, H, I, L, K, M, F, P, S, T, Y, or V
  MISC_FEATURE (15)..(15): X is I, L, M, or F
  MISC_FEATURE (17)..(17): X is A, G, or S
XXXXXXXXTXXNXXXKX

SEQ ID NO: 627 - protein, 9 aa, Artificial Sequence
  chemically synthesized
  MISC_FEATURE (1)..(1): X is A, R, N, Q, E, H, K, M, S, T, or Y
  MISC_FEATURE (2)..(2): X is A, R, N, D, C, Q, E, G, H, K, M, F, P, S, T, Y, or V
  MISC_FEATURE (3)..(3): X is Q, G, H, T, or W
  MISC_FEATURE (4)..(7): X is any amino acid sequence
  MISC_FEATURE (8)..(8): X is F or Y
  MISC_FEATURE (9)..(9): X is AI or Absent
XXXXXXXXX

SEQ ID NO: 628 - protein, 10 aa, Artificial Sequence
  chemically synthesized
RASSSVSYIY

SEQ ID NO: 629 - protein, 7 aa, Artificial Sequence
  chemically synthesized
ATFNLAS

SEQ ID NO: 630 - protein, 9 aa, Artificial Sequence
  chemically synthesized
HQRSSYPWT

SEQ ID NO: 631 - protein, 10 aa, Artificial Sequence
  chemically synthesized
GYTFPDYYMN

SEQ ID NO: 632 - protein, 17 aa, Artificial Sequence
  chemically synthesized
DIDPNYGGTTYNQKFKG

SEQ ID NO: 633 - protein, 3 aa, Artificial Sequence
  chemically synthesized
GAL

SEQ ID NO: 634 - protein, 10 aa, Artificial Sequence
  chemically synthesized
SASSSIRYMH

SEQ ID NO: 635 - protein, 7 aa, Artificial Sequence
  chemically synthesized
DTSKLTS

SEQ ID NO: 636 - protein, 9 aa, Artificial Sequence
  chemically synthesized
QQDSSYPLT

SEQ ID NO: 637 - protein, 10 aa, Artificial Sequence
  chemically synthesized
GYTFTSYDIN

SEQ ID NO: 638 - protein, 17 aa, Artificial Sequence
  chemically synthesized
WIFPRDNNTKYNENFKG

SEQ ID NO: 639 - protein, 7 aa, Artificial Sequence
  chemically synthesized
ENWVGDF

SEQ ID NO: 640 - protein, 11 aa, Artificial Sequence
  chemically synthesized
KASQDVGTAVA

SEQ ID NO: 641 - protein, 7 aa, Artificial Sequence
  chemically synthesized
WASTRHT

SEQ ID NO: 642 - protein, 9 aa, Artificial Sequence
  chemically synthesized
QQYYGYPLT

SEQ ID NO: 643 - protein, 10 aa, Artificial Sequence
  chemically synthesized
GYSITSDYWN

SEQ ID NO: 644 - protein, 16 aa, Artificial Sequence
  chemically synthesized
YISYTGSTYYNPSLKS

SEQ ID NO: 645 - protein, 8 aa, Artificial Sequence
  chemically synthesized
YGGWLSPF

SEQ ID NO: 646 - protein, 16 aa, Artificial Sequence
  chemically synthesized
KSSQSLLYSSNQKNSL

SEQ ID NO: 647 - protein, 10 aa, Artificial Sequence
  chemically synthesized
GYSIISDYWN

SEQ ID NO: 648 - protein, 8 aa, Artificial Sequence
  chemically synthesized
RGGWLLPF

SEQ ID NO: 649 - protein, 10 aa, Artificial Sequence
  chemically synthesized
GFSLTTYSIN

SEQ ID NO: 650 - protein, 16 aa, Artificial Sequence
  chemically synthesized
VMWAGGGTNSNSVLKS

SEQ ID NO: 651 - protein, 10 aa, Artificial Sequence
  chemically synthesized
YYGNSPYYAI

SEQ ID NO: 652 - protein, 13 aa, Artificial Sequence
  chemically synthesized
TRSSGSIGSNYVQ

SEQ ID NO: 653 - protein, 7 aa, Artificial Sequence
  chemically synthesized
EDNQRPS

SEQ ID NO: 654 - protein, 9 aa, Artificial Sequence
  chemically synthesized
QSYDSSTWV

SEQ ID NO: 655 - protein, 17 aa, Artificial Sequence
  chemically synthesized
WISPIGGSTNYAQKVQG

SEQ ID NO: 656 - protein, 19 aa, Artificial Sequence
  chemically synthesized
  MISC_FEATURE (3)..(17): X is any amino acid
GLXXXXXXXXXXXXXXXDV

SEQ ID NO: 657 - protein, 13 aa, Artificial Sequence
  chemically synthesized
TRSSGNIASNYVQ

SEQ ID NO: 658 - protein, 7 aa, Artificial Sequence
  chemically synthesized
GKNNRPS

SEQ ID NO: 659 - protein, 10 aa, Artificial Sequence
  chemically synthesized
QSYDSSNLWV

SEQ ID NO: 660 - protein, 5 aa, Artificial Sequence
  chemically synthesized
SYGIS

SEQ ID NO: 661 - protein, 17 aa, Artificial Sequence
  chemically synthesized
WISAYNGNTNYAQKLED

SEQ ID NO: 662 - protein, 15 aa, Artificial Sequence
  chemically synthesized
ALPSGTILVGGWFDP

SEQ ID NO: 663 - protein, 11 aa, Artificial Sequence
  chemically synthesized
QGDSLRSYYAS

SEQ ID NO: 664 - protein, 7 aa, Artificial Sequence
  chemically synthesized
SDRDRPS

SEQ ID NO: 665 - protein, 11 aa, Artificial Sequence
  chemically synthesized
NSRDSSGNHYV

SEQ ID NO: 666 - protein, 5 aa, Artificial Sequence
  chemically synthesized
SYALS

SEQ ID NO: 667 - protein, 17 aa, Artificial Sequence
  chemically synthesized
AISGGGGSTYYADSVKD

SEQ ID NO: 668 - protein, 15 aa, Artificial Sequence
  chemically synthesized
DVFPETFSMNYGMDV

SEQ ID NO: 669 - protein, 11 aa, Artificial Sequence
  chemically synthesized
GGSDIGRKSVH

SEQ ID NO: 670 - protein, 11 aa, Artificial Sequence
  chemically synthesized
QVWDNNSDHYV

SEQ ID NO: 671 - protein, 5 aa, Artificial Sequence
  chemically synthesized
DYAMH

SEQ ID NO: 672 - protein, 17 aa, Artificial Sequence
  chemically synthesized
LISGDGGSTYYADSVKD

SEQ ID NO: 673 - protein, 19 aa, Artificial Sequence
  chemically synthesized
VLLPCSSTSCYGSVGAFDI

SEQ ID NO: 674 - protein, 9 aa, Artificial Sequence
  chemically synthesized
SSYTSSTLP

SEQ ID NO: 675 - protein, 5 aa, Artificial Sequence
  chemically synthesized
NYDMS

SEQ ID NO: 676 - protein, 17 aa, Artificial Sequence
  chemically synthesized
RVNWNGGSTTYADAVKD

SEQ ID NO: 677 - protein, 8 aa, Artificial Sequence
  chemically synthesized
EFVGAYDL

SEQ ID NO: 678 - protein, 11 aa, Artificial Sequence
  chemically synthesized
RASQSIGNSLA

SEQ ID NO: 679 - protein, 7 aa, Artificial Sequence
  chemically synthesized
AASTLQS

SEQ ID NO: 680 - protein, 9 aa, Artificial Sequence
  chemically synthesized
QQHTIPTFS

SEQ ID NO: 681 - protein, 5 aa, Artificial Sequence
  chemically synthesized
GLYIH

SEQ ID NO: 682 - protein, 17 aa, Artificial Sequence
  chemically synthesized
WIIPIFGTANYAQKFED

SEQ ID NO: 683 - protein, 12 aa, Artificial Sequence
  chemically synthesized
GLRWGIWGWFDP

SEQ ID NO: 684 - protein, 11 aa, Artificial Sequence
  chemically synthesized
RASQGIGSYLA

SEQ ID NO: 685 - protein, 7 aa, Artificial Sequence
  chemically synthesized
QDIKRPS

SEQ ID NO: 686 - protein, 9 aa, Artificial Sequence
  chemically synthesized
QQLNNYPIT

SEQ ID NO: 687 - protein, 5 aa, Artificial Sequence
  chemically synthesized
DNAIS

SEQ ID NO: 688 - protein, 17 aa, Artificial Sequence
  chemically synthesized
WIIPIFGKPNYAQKFED

SEQ ID NO: 689 - protein, 12 aa, Artificial Sequence
  chemically synthesized
TMVRGFLGVMDV

SEQ ID NO: 690 - protein, 11 aa, Artificial Sequence
  chemically synthesized
SGDKLGNKYAY

SEQ ID NO: 691 - protein, 7 aa, Artificial Sequence
  chemically synthesized
EDYRRPS

SEQ ID NO: 692 - protein, 8 aa, Artificial Sequence
  chemically synthesized
QTWDNSVV

SEQ ID NO: 693 - protein, 17 aa, Artificial Sequence
  chemically synthesized
AISGSGGSTYYADSVKD

SEQ ID NO: 694 - protein, 16 aa, Artificial Sequence
  chemically synthesized
DQFVTIFGVPRYGMDV

SEQ ID NO: 695 - protein, 13 aa, Artificial Sequence
  chemically synthesized
TRSSGSIDSNYVQ

SEQ ID NO: 696 - protein, 7 aa, Artificial Sequence
  chemically synthesized
DDSDRPS

SEQ ID NO: 697 - protein, 11 aa, Artificial Sequence
  chemically synthesized
QSYDSNNRHVI

SEQ ID NO: 698 - protein, 5 aa, Artificial Sequence
  chemically synthesized
TYALN

SEQ ID NO: 699 - protein, 17 aa, Artificial Sequence
  chemically synthesized
RIVPLIGLVNYAHNFED

SEQ ID NO: 700 - protein, 11 aa, Artificial Sequence
  chemically synthesized
GRQMFGAGIDF

SEQ ID NO: 701 - protein, 13 aa, Artificial Sequence
  chemically synthesized
TRSSGNIGTNYVQ

SEQ ID NO: 702 - protein, 7 aa, Artificial Sequence
  chemically synthesized
EDNKRPS

SEQ ID NO: 703 - protein, 9 aa, Artificial Sequence
  chemically synthesized
QSYHSSGWE

SEQ ID NO: 704 - protein, 5 aa, Artificial Sequence
  chemically synthesized
SHGIT

SEQ ID NO: 705 - protein, 17 aa, Artificial Sequence
  chemically synthesized
WISAHNGHASNAQKVED

SEQ ID NO: 706 - protein, 9 aa, Artificial Sequence
  chemically synthesized
EVYGGNSDY

SEQ ID NO: 707 - protein, 11 aa, Artificial Sequence
  chemically synthesized
GGNNIGSKGVH

SEQ ID NO: 708 - protein, 11 aa, Artificial Sequence
  chemically synthesized
YKSDSNKQQAS

SEQ ID NO: 709 - protein, 11 aa, Artificial Sequence
  chemically synthesized
QVWDSSSDHWV

SEQ ID NO: 710 - protein, 5 aa, Artificial Sequence
  chemically synthesized
RHGMH

SEQ ID NO: 711 - protein, 17 aa, Artificial Sequence
  chemically synthesized
VISHDGSVKYYADSMKD

SEQ ID NO: 712 - protein, 11 aa, Artificial Sequence
  chemically synthesized
VHAALYYGMDV

SEQ ID NO: 713 - protein, 13 aa, Artificial Sequence
  chemically synthesized
TRSSGSIASNYVQ

SEQ ID NO: 714 - protein, 10 aa, Artificial Sequence
  chemically synthesized
QSYDSTTPSV

SEQ ID NO: 715 - protein, 17 aa, Artificial Sequence
  chemically synthesized
WTSPHNGLTAFAQILED

SEQ ID NO: 716 - protein, 12 aa, Artificial Sequence
  chemically synthesized
GLSYQVSGWFDP

SEQ ID NO: 717 - protein, 13 aa, Artificial Sequence
  chemically synthesized
TRSSGSIASHYVQ

SEQ ID NO: 718 - protein, 9 aa, Artificial Sequence
  chemically synthesized
QSYDGITVI

SEQ ID NO: 719 - protein, 17 aa, Artificial Sequence
  chemically synthesized
RIIPILGIANYAQKFED

SEQ ID NO: 720 - protein, 11 aa, Artificial Sequence
  chemically synthesized
VHPVFSYALDV

SEQ ID NO: 721 - protein, 14 aa, Artificial Sequence
  chemically synthesized
TLRSGLNVGSYRIY

SEQ ID NO: 722 - protein, 10 aa, Artificial Sequence
  chemically synthesized
QSYDSSNRWV

SEQ ID NO: 723 - protein, 5 aa, Artificial Sequence
  chemically synthesized
TYAFS

SEQ ID NO: 724 - protein, 17 aa, Artificial Sequence
  chemically synthesized
WISAYNGNTNYAQKVED

SEQ ID NO: 725 - protein, 9 aa, Artificial Sequence
  chemically synthesized
DGYGSDPVL

SEQ ID NO: 726 - protein, 9 aa, Artificial Sequence
  chemically synthesized
MIWYSSAVV

SEQ ID NO: 727 - protein, 5 aa, Artificial Sequence
  chemically synthesized
NYGIS

SEQ ID NO: 728 - protein, 9 aa, Artificial Sequence
  chemically synthesized
GDFRKPFDY

SEQ ID NO: 729 - protein, 15 aa, Artificial Sequence
  chemically synthesized
RATESVEYYGTSLVQ

SEQ ID NO: 730 - protein, 7 aa, Artificial Sequence
  chemically synthesized
AASSVDS

SEQ ID NO: 731 - protein, 9 aa, Artificial Sequence
  chemically synthesized
QQSRRVPYT

SEQ ID NO: 732 - protein, 5 aa, Artificial Sequence
  chemically synthesized
SYVMH

SEQ ID NO: 733 - protein, 17 aa, Artificial Sequence
  chemically synthesized
YVNPFNDGTKYNEMFKG

SEQ ID NO: 734 - protein, 6 aa, Artificial Sequence
  chemically synthesized
QAWGYP

SEQ ID NO: 735 - protein, 122 aa, Artificial Sequence
  chemically synthesized
EVQLVESGGGLVQPGGSLRLSCAASGFTFSDSWIHWVRQAPGKGLEWVAWISPYGGSTYYADSVKGRFTISADTSKNTAYLQMNSLRAEDTAVYYCARRHWPGGFDYWGQGTLVTVSSASTK

SEQ ID NO: 736 - protein, 118 aa, Artificial Sequence [sequence omitted]

SEQ ID NO: 737 - protein, 447 aa, Artificial Sequence
  chemically synthesized
EVQLVESGGGLVQPGGSLRLSCAASGFTFSDSWIHWVRQAPGKGLEWVAWISPYGGSTYYADSVKGRFTISADTSKNTAYLQMNSLRAEDTAVYYCARRHWPGGFDYWGQGTLVTVSSASTKGPSVFPLAPSSKSTSGGTAALGCLVKDYFPEPVTVSWNSGALTSGVHTFPAVLQSSGLYSLSSVVTVPSSSLGTQTYICNVNHKPSNTKVDKKVEPKSCDKTHTCPPCPAPELLGGPSVFLFPPKPKDTLMISRTPEVTCVVVDVSHEDPEVKFNWYVDGVEVHNAKTKPREEQYASTYRVVSVLTVLHQDWLNGKEYKCKVSNKALPAPIEKTISKAKGQPREPQVYTLPPSREEMTKNQVSLTCLVKGFYPSDIAVEWESNGQPENNYKTTPPVLDSDGSFFLYSKLTVDKSRWQQGNVFSCSVMHEALHNHYTQKSLSLSPG

SEQ ID NO: 738 - protein, 214 aa, Artificial Sequence
  chemically synthesized
DIQMTQSPSSLSASVGDRVTITCRASQDVSTAVAWYQQKPGKAPKLLIYSASFLYSGVPSRFSGSGSGTDFTLTISSLQPEDFATYYCQQYLYHPATFGQGTKVEIKRTVAAPSVFIFPPSDEQLKSGTASVVCLLNNFYPREAKVQWKVDNALQSGNSQESVTEQDSKDSTYSLSSTLTLSKADYEKHKVYACEVTHQGLSSPVTKSFNRGEC

SEQ ID NO: 739 - protein, 121 aa, Artificial Sequence
  chemically synthesized
EVQLVESGGGLVQPGGSLRLSCAASGFTFSRFWMSWVRQAPGKGLEWVANINQDGTEKYYVDSVKGRFTISRDNAKNSLYLQMNSLRAGDTAVYYCANTYYDFWSGHFDYWGQGTLVTVSS

SEQ ID NO: 740 - protein, 121 aa, Artificial Sequence
  chemically synthesized
QEHLVESGGGVVQPGRSLRLSCEASGFTFSNFGMHWVRQAPGKGLEWVAALWSDGSNKYYADSVKGRVTISRDNSKNTLYLQMNSLRAEDTAVYYCARGRGAPGIPIFGYWGQGTLVTVSS

SEQ ID NO: 741 - protein, 130 aa, Artificial Sequence
  chemically synthesized
EVQLVESGGGLVKPGGSLRLSCAASGFTFSNAWMSWVRQAPGKGLEWVGRIKRKTDGGTTDYAAPVKGRFTISRDDSKNTLHLQMNSLKTEDTAVYYCTTDDIVVVPAVMREYYFGMDVWGQGTTVTVSS

SEQ ID NO: 742 - protein, 121 aa, Artificial Sequence
  chemically synthesized
QVQLVQSGAEVKKPGASVQVSCKASGYSFTGYYIHWVRQAPGQGLEWMGWINPNSGTKKYAHKFQGRVTMTRDTSIDTAYMILSSLISDDTAVYYCARDEDWNFGSWFDSWGQGTLVTVSS

SEQ ID NO: 743 - protein, 121 aa, Artificial Sequence
  chemically synthesized
QVHLVQSGAEVKKPGASVKVSCKASGYTFTGYYIHWVRQAPGHGLEWMGWLNPNTGTTKYIQNFQGRVTMTRDTSSSTAYMELTRLRSDDTAVYYCARDEDWNYGSWFDTWGQGTLVTVSS

SEQ ID NO: 744 - protein, 120 aa, Artificial Sequence
  chemically synthesized
EVQLVESGGGVVRPGGSLRLSCAASGFTFDDYGMTWVRQAPGRGLEWVSGIHWHGKRTGYADSVKGRFTISRDNAKKSLYLQMNSLKGEDTALYHCVRGGMSTGDWFDPWGQGTLVIVSS

SEQ ID NO: 745 - protein, 120 aa, Artificial Sequence
  chemically synthesized
EVQLVESGGGVVRPGGSLRLSCAASGFTFDDYGMTWVRQVPGKGLEWVSGIHWSGRSTGYADSVKGRFTISRDNAKNSLYLQMNSLRAEDTALYYCARGGMSTGDWFDPWGQGTLVTVSS

SEQ ID NO: 746 - protein, 115 aa, Artificial Sequence
  chemically synthesized
EVQLVESGGGLVQPGGSLRLSCAASGFTVGSNYMNWVRQAPGKGLEWVSVIYSGGSTYYADSVKGRFTISRLTSKNTLYLQMSSLRPEDTAVYYCARGIRGLDVWGQGTTVTVSS

SEQ ID NO: 747 - protein, 115 aa, Artificial Sequence
  chemically synthesized
EERLVESGGDLVQPGGSLRLSCAASGITVGTNYMNWVRQAPGKGLEWVSVISSGGNTHYADSVKGRFIMSRQTSKNTLYLQMNSLETEDTAVYYCARGIRGLDVWGQGTMVTVSS

SEQ ID NO: 748 - protein, 118 aa, Artificial Sequence
  chemically synthesized
QVQLVQSGAEVKMPGSSVRVSCKASGGIFSSSTISWVRQAPGQGLEWMGEIIPVFGTVNYAQKFQDRVIFTADESTTTAYMELSSLKSGDTAVYFCARNWGLGSFYIWGQGTMVTVSS

SEQ ID NO: 749 - protein, 115 aa, Artificial Sequence
  chemically synthesized
EVQLVESGGDLVHPGRSLRLSCAASGFPFDEYAMHWVRQVPGKGLEWVSGISWSNNNIGYADSVKGRFTISRDNAKNSLYLQMNSLRPEDTAFYYCAKSGIFDSWGQGTLVTVSS

SEQ ID NO: 750 - protein, 118 aa, Artificial Sequence
  chemically synthesized
EVQLVESGGGVVQPGRSLRLSCAASGFTFSSYGMHWVRQAPGKGLEWVTLISYEGRNKYYADSVKGRFTISRDNSKNTLYLQMNSLRAEDTAVYYCAKDRTLYGMDVWGQGTTVTVSS

SEQ ID NO: 751 - protein, 121 aa, Artificial Sequence
  chemically synthesized
QVTLRESGPALVKTTQTLTLTCTFSGFSLSTNRMCVTWIRQPPGKALEWLARIDWDGVKYYNTSLKTRLTISKDTSKNQVVLTMTNMDPVDTATFYCARSTSLTFYYFDYWGQGTLVTVSS

SEQ ID NO: 752 - protein, 115 aa, Artificial Sequence
  chemically synthesized
EVQLVESGGGLVQPGGSLRLSCAASEFTVGTNHMNWVRQAPGKGLEWVSVIYSGGNTFYADSVKGRFTISRHTSKNTLYLQMNSLTAEDTAVYYCARGLGGMDVWGQGTTVTVSS

SEQ ID NO: 753 - protein, 120 aa, Artificial Sequence
  chemically synthesized
EVQLVESGGGLVQRGESLRLYCAASGFTFSKYWMNWVRQAPGKGLEWVANIKGDGSEKYYVDSVKGRFTISRDNAKNSLYLQMNSLRAEDTAVYYCARDYWGSGYYFDFWGQGTLVTVSS

SEQ ID NO: 754 - protein, 130 aa, Artificial Sequence
  chemically synthesized
EVQLVESGGGLVQSGGSLRLSCAASGFTFSSYWMSWVRQAPGKGLEWVANIKQDGSEKYYVDSVKGRFTISRDNAKNSLYLQMNSLRADDTAVYYCARDDIVVVPAPMGYYYYYFGMDVWGQGTTVTVSS

SEQ ID NO: 755 - protein, 123 aa, Artificial Sequence
  chemically synthesized
EVQLVESGGGLVQPGRSLRLSCAASGFTFDDFAMHWVRQAPGKGLEWVSGISWTGGNMDYANSVKGRFTISREDAKNSLYLQMNSLRAADTALYYCVKDIRGIVATGGAFDIWGRGTMVTVSS

SEQ ID NO: 756 - protein, 115 aa, Artificial Sequence
  chemically synthesized
EVQLVESGGGLVQPGGSLRLSCAASGFTVGTNYMNWVRQAPGKGLEWISVIYSGGSTFYADSVKGRFTISRQTSQNTLYLQMNSLRPEDTAVYYCARGIRGFDIWGQGTMVTVSS

SEQ ID NO: 757 - protein, 115 aa, Artificial Sequence
  chemically synthesized
EVQLVESGGGLVQPGGSLRLSCAASGFTISTNYMNWVRQAPGKGLEWVAVIYSSGSTYYIDSVKGRFTISRLTSKNTVYLQMSSLNSEDTAVYYCARGIRGFDIWGQGTMVTVSS

SEQ ID NO: 758 - protein, 124 aa, Artificial Sequence
  chemically synthesized
EVQLVESGGGLVQPGRSLRLSCAASGFTIDDSAMHWVRQTPGKGLEWVSGISWKSGSIGYADSVRGRFTISRDNAKNSLYLQMNSLRVEDTALYYCVKDIRGNWNYGGNWFDPWGQGTLVTVSS

SEQ ID NO: 759 - protein, 115 aa, Artificial Sequence
  chemically synthesized
EVQLVESGGGLVQPGGSLRLSCEASGFTVGVNHMNWVRQAPGKGLEWVSVIFSSGRTFYGDYVKGRLTIFRQTSQNTVYLQMNSLRSEDTAIYYCARGIGGLDIWGRGTMVTVSS

SEQ ID NO: 760 - protein, 123 aa, Artificial Sequence
  chemically synthesized
EVQLVESGGGLVQPGRSLRLSCAASGFTFDDYALHWVRQAPGKGLEWVSGISWTGGTIDYADSVKGRFTISRDNAKNSLYLQMSSLRTEDTAIYYCTRDIRGNWKYGGWFDPWGQGTLVTVSS

SEQ ID NO: 761 - protein, 120 aa, Artificial Sequence
  chemically synthesized
QVQLVQSGTEVKKPGASVKVSCKASGYTFTAYYMHWVRQAPGQGLDWMGWISPNSGFTNYAQKFQGRVTMTRDTSINTFYMELSGLRSDDTAVYYCAREGSTHHNSFDPWGQGTLVTVSS

SEQ ID NO: 762 - protein, 114 aa, Artificial Sequence
  chemically synthesized
EVQLVESGGGLVQPGGSLRLSCAASGFTVGTNFMNWVRQAPGKGLEWVSAIYSGGTANYADSVKGRFTISRDTSRNTLYLQMNSLRTEDTAVYYCARGGGMDVWGQGTTVTVSS

SEQ ID NO: 763 - protein, 118 aa, Artificial Sequence
  chemically synthesized
QVQLVQSGAEVKKPGSSVKVSCKASGGTFNTYVLSWVRQAPGQGLEWMGEIIPILGAANYAQNFQGRVTFTTDESTNTAYMDLSSLRSEDTAVYYCARDRTSGGFDPWGQGTLVTVSS

SEQ ID NO: 764 - protein, 119 aa, Artificial Sequence
  chemically synthesized
QVQLVQSGAEVEKPGASVKVSCKASGYIFTHYGISWVRQAPGQGLEWVGWISPYNGYTDYAQKLQGRVTLTTDTSTTTAYMELRNLRSDDTAMYYCSRGRGPYWSFDLWGRGTLVTVSS

SEQ ID NO: 765 - protein, 106 aa, Artificial Sequence
  chemically synthesized
DIQMTQSPSTLSASVGDRVTITCRASQSISNWLAWYQQKPGKAPKLLIYKASSLESGVPSRFSGSGSGTEFTLTISSLQPDDFATYYCQQYHSYSYTFGQGTKEIK

SEQ ID NO: 766 - protein, 107 aa, Artificial Sequence
  chemically synthesized
DIQMTQSPSSLSASVGDRVTITCRASQGIRNDLGWYQQKPGKAPKRLIYTASSLQSGVPSRFSGSGSGTEFTLTISSLQPEDFATYYCLQHNSYPLTFGGGTKVAIK

SEQ ID NO: 767 - protein, 107 aa, Artificial Sequence
  chemically synthesized
DIQMTQSPSSLSASVGDRVTITCRTSQGIRNDLGWYQQKPGKAPKRLIYAASSLQSGVPSRFSGSGSGTEFTLTISSLQPEDFATYYCLQHNNYPYTFGQGTKLEIK

SEQ ID NO: 768 - protein, 112 aa, Artificial Sequence
  chemically synthesized
DIVMTQTPLSSPVTLGQPASISCRSSQTLVHGDGNTYLSWIQQRPGQPPRLLIYKVSNQFSGVPDRFSGSGAGTDFTLKISRVEAEDVGLYFCMQATHFPITFGQGTRLEIK

SEQ ID NO: 769 - protein, 112 aa, Artificial Sequence
  chemically synthesized
DIVMTQTPLSSPVTLGQPASISCRSSPSLVHSDGNTYLSWLQQRPGQPPRLLIYKISNRFSGVPDRFSGSGAGTDFTLKISRVEAEDVGVYYCMQATHFPITFGQGTRLEIR

SEQ ID NO: 770 - protein, 108 aa, Artificial Sequence
  chemically synthesized
DIQMTQSPSSLSASLGDRVTITCRASQSINSYLNWYQQKPGKAPKLLIYVASSLQSGVPSRFSGSGSGTEFTLTISNLQPEDFATYYCQQSYSTPPITFGQGTRLEIK

SEQ ID NO: 771 - protein, 108 aa, Artificial Sequence
  chemically synthesized
DIQMTQSPSSLSASVGDRVTITCRASQSISSYLNWYQQKPGKAPKLLIYVASSLQSGVPSRFSGSGSGTDFTLTISSLQPEDFATYYCQQSYSTPPITFGQGTRLEIK

SEQ ID NO: 772 - protein, 108 aa, Artificial Sequence
  chemically synthesized
DIQMTQSPSSLSASVGDRVTITCRASQTINIYLNWYQQKPGRAPRLLIYAASSLQSGVPSRFSGSGSGTDFTLTISSLQPEDFATYYCHQSYSTPPITFGQGTRLEIK

SEQ ID NO: 773 - protein, 108 aa, Artificial Sequence
  chemically synthesized
DIQMTQSPSSLSASVGDRVTITCRASQSMSSYLNWYQQKPGRAPKLLIFAASSLQSGVPSRFSGSGSGTDFTLTISSLQPEDFATYYCQQSYSTPPITFGQGTRLEIK

SEQ ID NO: 774 - protein, 108 aa, Artificial Sequence
  chemically synthesized
EIVLTQSPGTLSLSPGERATLSCRASQSFNFNYLAWYQQKPGQAPRLLIYGASSRATGIPDRFSGSGSGTDFTLTINRLEPEDFGVFYCQQYESAPWTFGQGTKVEIK

SEQ ID NO: 775 - protein, 105 aa, Artificial Sequence
  chemically synthesized
DIQMTQSPSSLSASVGDRVTITCRASQSISSYLNWYQQKPGKLLIYAASSLQSGVPSRFSGGGSGTDFTLTISSLRPEDFATYYCQQSYCTPPITFGQGTRLEIK

SEQ ID NO: 776 - protein, 108 aa, Artificial Sequence
  chemically synthesized
DIQMTQSPSSLSASVGDRVTITCRASQSISSYLNWYQQKPGKAPKLLIYAASSLQSGVPSRFSGSGSGTDFTLTISSLQPEDFATYYCQQSYSTPPITFGQGTRLEIK

SEQ ID NO: 777 - protein, 91 aa, Artificial Sequence
  chemically synthesized
DRVTITCRASQVISNYLAWYQQKPGKVPRLLIYAASTLQSGVPSRFSGSGSGTDFTLTISSLQPEDVATYYCQKYNSAPRTFGQGTKVEIK

SEQ ID NO: 778 - protein, 107 aa, Artificial Sequence
  chemically synthesized
DIQMTQSPSSLSASVGDRVTITCRASQNINNYLNWYQQKPGKAPKLLIYAASSFQNAVPSRFSGSGSGTDFTLTISSLQPEDFATYYCQQSYNTPLTFGGGTKVEIK

SEQ ID NO: 779 - protein, 107 aa, Artificial Sequence
  chemically synthesized
DIQMTQSPSSLSASVGDRVTITCRASQGIRNDLGWYQQKPGKAPKRLIYAASSLQSGVPSRFSGSGSGTEFTLTISSLQPEDFATYYCLQHNSYPYTFGQGTKLEIK

SEQ ID NO: 780 - protein, 108 aa, Artificial Sequence; identical to SEQ ID NO: 776
  chemically synthesized

SEQ ID NO: 781 - protein, 6 aa, Artificial Sequence
  chemically synthesized
QSISNW

SEQ ID NO: 782 - protein, 3 aa, Artificial Sequence
  chemically synthesized
KAS

SEQ ID NO: 783 - protein, 9 aa, Artificial Sequence
  chemically synthesized
QQYHSYSYT

SEQ ID NO: 784 - protein, 8 aa, Artificial Sequence
  chemically synthesized
GFTFSRFW

SEQ ID NO: 785 - protein, 8 aa, Artificial Sequence
  chemically synthesized
INQDGTEK

SEQ ID NO: 786 - protein, 14 aa, Artificial Sequence
  chemically synthesized
ANTYYDFWSGHFDY

SEQ ID NO: 787 - protein, 6 aa, Artificial Sequence
  chemically synthesized
QGIRND

SEQ ID NO: 788 - protein, 3 aa, Artificial Sequence
  chemically synthesized
TAS

SEQ ID NO: 789 - protein, 9 aa, Artificial Sequence
  chemically synthesized
LQHNSYPLT

SEQ ID NO: 790 - protein, 8 aa, Artificial Sequence
  chemically synthesized
GFTFSNFG

SEQ ID NO: 791 - protein, 8 aa, Artificial Sequence
  chemically synthesized
LWSDGSNK

SEQ ID NO: 792 - protein, 14 aa, Artificial Sequence
  chemically synthesized
ARGRGAPGIPIFGY

SEQ ID NO: 793 - protein, 3 aa, Artificial Sequence
  chemically synthesized
AAS

SEQ ID NO: 794 - protein, 9 aa, Artificial Sequence
  chemically synthesized
LQHNNYPYT

SEQ ID NO: 795 - protein, 8 aa, Artificial Sequence
  chemically synthesized
GFTFSNAW

SEQ ID NO: 796 - protein, 10 aa, Artificial Sequence
  chemically synthesized
IKRKTDGGTT

SEQ ID NO: 797 - protein, 21 aa, Artificial Sequence
  chemically synthesized
TTDDIVVVPAVMREYYFGMDV

SEQ ID NO: 798 - protein, 11 aa, Artificial Sequence
  chemically synthesized
QTLVHGDGNTY

SEQ ID NO: 799 - protein, 3 aa, Artificial Sequence
  chemically synthesized
KVS

SEQ ID NO: 800 - protein, 9 aa, Artificial Sequence
  chemically synthesized
MQATHFPIT

SEQ ID NO: 801 - protein, 8 aa, Artificial Sequence
  chemically synthesized
GYSFTGYY

SEQ ID NO: 802 - protein, 8 aa, Artificial Sequence
  chemically synthesized
INPNSGTK

SEQ ID NO: 803 - protein, 14 aa, Artificial Sequence
  chemically synthesized
ARDEDWNFGSWFDS

SEQ ID NO: 804 - protein, 11 aa, Artificial Sequence
  chemically synthesized
PSLVHSDGNTY

SEQ ID NO: 805 - protein, 3 aa, Artificial Sequence
  chemically synthesized
KIS

SEQ ID NO: 806 - protein, 8 aa, Artificial Sequence
  chemically synthesized
GYTFTGYY

SEQ ID NO: 807 - protein, 8 aa, Artificial Sequence
  chemically synthesized
LNPNTGTT

SEQ ID NO: 808 - protein, 14 aa, Artificial Sequence
  chemically synthesized
ARDEDWNYGSWFDT

SEQ ID NO: 809 - protein, 6 aa, Artificial Sequence
  chemically synthesized
QSINSY

SEQ ID NO: 810 - protein, 3 aa, Artificial Sequence
  chemically synthesized
VAS

SEQ ID NO: 811 - protein, 10 aa, Artificial Sequence
  chemically synthesized
QQSYSTPPIT

SEQ ID NO: 812 - protein, 8 aa, Artificial Sequence
  chemically synthesized
GFTFDDYG

SEQ ID NO: 813 - protein, 8 aa, Artificial Sequence
  chemically synthesized
IHWHGKRT

SEQ ID NO: 814 - protein, 13 aa, Artificial Sequence
  chemically synthesized
VRGGMSTGDWFDP

SEQ ID NO: 815 - protein, 6 aa, Artificial Sequence
  chemically synthesized
QSISSY

SEQ ID NO: 816 - protein, 8 aa, Artificial Sequence
  chemically synthesized
IHWSGRST

SEQ ID NO: 817 - protein, 13 aa, Artificial Sequence
  chemically synthesized
ARGGMSTGDWFDP

SEQ ID NO: 818 - protein, 6 aa, Artificial Sequence
  chemically synthesized
QTINIY

SEQ ID NO: 819 - protein, 10 aa, Artificial Sequence
  chemically synthesized
HQSYSTPPIT

SEQ ID NO: 820 - protein, 8 aa, Artificial Sequence
  chemically synthesized
GFTVGSNY

SEQ ID NO: 821 - protein, 7 aa, Artificial Sequence
  chemically synthesized
IYSGGST

SEQ ID NO: 822 - protein, 9 aa, Artificial Sequence
  chemically synthesized
ARGIRGLDV

SEQ ID NO: 823 - protein, 7 aa, Artificial Sequence
  chemically synthesized
QSFNFNY

SEQ ID NO: 824 - protein, 3 aa, Artificial Sequence
  chemically synthesized
GAS

SEQ ID NO: 825 - protein, 9 aa, Artificial Sequence
  chemically synthesized
QQYESAPWT

SEQ ID NO: 826 - protein, 8 aa, Artificial Sequence
  chemically synthesized
GGIFSSST

SEQ ID NO: 827 - protein, 8 aa, Artificial Sequence
  chemically synthesized
IIPVFGTV

SEQ ID NO: 828 - protein, 11 aa, Artificial Sequence
  chemically synthesized
ARNWGLGSFYI

SEQ ID NO: 829 - protein, 10 aa, Artificial Sequence
  chemically synthesized
QQSYCTPPIT

SEQ ID NO: 830 - protein, 8 aa, Artificial Sequence
  chemically synthesized
GFPFDEYA

SEQ ID NO: 831 - protein, 8 aa, Artificial Sequence
  chemically synthesized
ISWSNNNI

SEQ ID NO: 832 - protein, 8 aa, Artificial Sequence
  chemically synthesized
AKSGIFDS

SEQ ID NO: 833 - protein, 8 aa, Artificial Sequence
  chemically synthesized
GFTFSSYG

SEQ ID NO: 834 - protein, 8 aa, Artificial Sequence
  chemically synthesized
ISYEGRNK

SEQ ID NO: 835 - protein, 11 aa, Artificial Sequence
  chemically synthesized
AKDRTLYGMDV

SEQ ID NO: 836 - protein, 6 aa, Artificial Sequence
  chemically synthesized
QVISNY

SEQ ID NO: 837 - protein, 9 aa, Artificial Sequence
  chemically synthesized
QKYNSAPRT

SEQ ID NO: 838 - protein, 10 aa, Artificial Sequence
  chemically synthesized
GFSLSTNRMC

SEQ ID NO: 839 - protein, 7 aa, Artificial Sequence
  chemically synthesized
IDWDGVK

SEQ ID NO: 840 - protein, 13 aa, Artificial Sequence
  chemically synthesized
ARSTSLTFYYFDY

SEQ ID NO: 841 - protein, 6 aa, Artificial Sequence
  chemically synthesized
QNINNY

SEQ ID NO: 842 - protein, 9 aa, Artificial Sequence
  chemically synthesized
QQSYNTPLT

SEQ ID NO: 843 - protein, 8 aa, Artificial Sequence
  chemically synthesized
EFTVGTNH

SEQ ID NO: 844 - protein, 7 aa, Artificial Sequence
  chemically synthesized
IYSGGNT

SEQ ID NO: 845 - protein, 9 aa, Artificial Sequence
  chemically synthesized
ARGLGGMDV

SEQ ID NO: 846 - protein, 6 aa, Artificial Sequence
  chemically synthesized
QTISTY

SEQ ID NO: 847 - protein, 9 aa, Artificial Sequence
  chemically synthesized
LQHNSYPYT

SEQ ID NO: 848 - protein, 8 aa, Artificial Sequence
  chemically synthesized
GFTFSKYW

SEQ ID NO: 849 - protein, 8 aa, Artificial Sequence
  chemically synthesized
IKGDGSEK

SEQ ID NO: 850 - protein, 13 aa, Artificial Sequence
  chemically synthesized
ARDYWGSGYYFDF

SEQ ID NO: 851 - protein, 3 aa, Artificial Sequence
  chemically synthesized
VVS

SEQ ID NO: 852 - protein, 9 aa, Artificial Sequence
  chemically synthesized
QQSYSTPFT

SEQ ID NO: 853 - protein, 8 aa, Artificial Sequence
  chemically synthesized
GFTFSSYW

SEQ ID NO: 854 - protein, 8 aa, Artificial Sequence
  chemically synthesized
IKQDGSEK

SEQ ID NO: 855 - protein, 23 aa, Artificial Sequence
  chemically synthesized
ARDDIVVVPAPMGYYYYYFGMDV

SEQ ID NO: 856 - protein, 8 aa, Artificial Sequence
  chemically synthesized
GFTFDDFA

SEQ ID NO: 857 - protein, 8 aa, Artificial Sequence
  chemically synthesized
ISWTGGNM

SEQ ID NO: 858 - protein, 16 aa, Artificial Sequence
  chemically synthesized
VKDIRGIVATGGAFDI

SEQ ID NO: 859 - protein, 8 aa, Artificial Sequence
  chemically synthesized
GFTVGTNY

SEQ ID NO: 860 - protein, 9 aa, Artificial Sequence
  chemically synthesized
ARGIRGFDI

SEQ ID NO: 861 - protein, 8 aa, Artificial Sequence
  chemically synthesized
GFTISTNY

SEQ ID NO: 862 - protein, 7 aa, Artificial Sequence
  chemically synthesized
IYSSGST

SEQ ID NO: 863 - protein, 8 aa, Artificial Sequence
  chemically synthesized
GFTIDDSA

SEQ ID NO: 864 - protein, 8 aa, Artificial Sequence
  chemically synthesized
ISWKSGSI

SEQ ID NO: 865 - protein, 17 aa, Artificial Sequence
  chemically synthesized
VKDIRGNWNYGGNWFDP

SEQ ID NO: 866 - protein, 8 aa, Artificial Sequence
  chemically synthesized
GFTVGVNH

SEQ ID NO: 867 - protein, 7 aa, Artificial Sequence
  chemically synthesized
IFSSGRT

SEQ ID NO: 868 - protein, 9 aa, Artificial Sequence
  chemically synthesized
ARGIGGLDI

SEQ ID NO: 869 - protein, 8 aa, Artificial Sequence
  chemically synthesized
GFTFDDYA

SEQ ID NO: 870 - protein, 8 aa, Artificial Sequence
  chemically synthesized
ISWTGGTI

SEQ ID NO: 871 - protein, 16 aa, Artificial Sequence
  chemically synthesized
TRDIRGNWKYGGWFDP

SEQ ID NO: 872 - protein, 8 aa, Artificial Sequence
  chemically synthesized
GYTFTAYY

SEQ ID NO: 873 - protein, 8 aa, Artificial Sequence
  chemically synthesized
ISPNSGFT

SEQ ID NO: 874 - protein, 13 aa, Artificial Sequence
  chemically synthesized
AREGSTHHNSFDP

SEQ ID NO: 875 - protein, 8 aa, Artificial Sequence
  chemically synthesized
GFTVGTNF

SEQ ID NO: 876 - protein, 8 aa, Artificial Sequence
  chemically synthesized
IIPILGAA

SEQ ID NO: 877 - protein, 8 aa, Artificial Sequence
  chemically synthesized
ARGGGMDV

SEQ ID NO: 878 - protein, 8 aa, Artificial Sequence
  chemically synthesized
GGTFNTYV

SEQ ID NO: 879 - protein, 8 aa, Artificial Sequence
  chemically synthesized
ISPYNGYT

SEQ ID NO: 880 - protein, 11 aa, Artificial Sequence
  chemically synthesized
ARDRTSGGFDP

SEQ ID NO: 881 - protein, 8 aa, Artificial Sequence
  chemically synthesized
GYIFTHYG

SEQ ID NO: 882 - protein, 12 aa, Artificial Sequence
  chemically synthesized
SRGRGPYWSFDL

SEQ ID NO: 883 - protein, 8 aa, Artificial Sequence
  chemically synthesized
LSGRSGNH

SEQ ID NO: 884 - protein, 9 aa, Artificial Sequence
  chemically synthesized
SGRSANPRG

SEQ ID NO: 885 - protein, 8 aa, Artificial Sequence
  chemically synthesized
LSGRSDDH

SEQ ID NO: 886 - protein, 8 aa, Artificial Sequence
  chemically synthesized
LSGRSDIH

SEQ ID NO: 887 - protein, 8 aa, Artificial Sequence
  chemically synthesized
LSGRSDQH

SEQ ID NO: 888 - protein, 8 aa, Artificial Sequence
  chemically synthesized
LSGRSDTH

SEQ ID NO: 889 - protein, 8 aa, Artificial Sequence
  chemically synthesized
LSGRSDYH

SEQ ID NO: 890 - protein, 8 aa, Artificial Sequence
  chemically synthesized
LSGRSDNP

SEQ ID NO: 891 - protein, 8 aa, Artificial Sequence
  chemically synthesized
LSGRSANP

SEQ ID NO: 892 - protein, 8 aa, Artificial Sequence
  chemically synthesized
LSGRSANI

SEQ ID NO: 893 - protein, 8 aa, Artificial Sequence
  chemically synthesized
LSGRSDNI

SEQ ID NO: 894 - protein, 8 aa, Artificial Sequence
  chemically synthesized
MIAPVAYR

SEQ ID NO: 895 - protein, 8 aa, Artificial Sequence
  chemically synthesized
RPSPMWAY

SEQ ID NO: 896 - protein, 8 aa, Artificial Sequence
  chemically synthesized
WATPRPMR

SEQ ID NO: 897 - protein, 8 aa, Artificial Sequence
  chemically synthesized
FRLLDWQW

SEQ ID NO: 898 - protein, 5 aa, Artificial Sequence
  chemically synthesized
ISSGL

SEQ ID NO: 899 - protein, 7 aa, Artificial Sequence
  chemically synthesized
ISSGLLS

SEQ ID NO: 900 - protein, 6 aa, Artificial Sequence
  chemically synthesized
ISSGLL

SEQ ID NO: 901 - protein, 15 aa, Artificial Sequence
  chemically synthesized
ISSGLLSGRSANPRG

SEQ ID NO: 902 - protein, 18 aa, Artificial Sequence
  chemically synthesized
AVGLLAPPTSGRSANPRG

SEQ ID NO: 903 - protein, 17 aa, Artificial Sequence
  chemically synthesized
AVGLLAPPSGRSANPRG

SEQ ID NO: 904 - protein, 13 aa, Artificial Sequence
  chemically synthesized
ISSGLLSGRSDDH

SEQ ID NO: 905 - protein, 13 aa, Artificial Sequence
  chemically synthesized
ISSGLLSGRSDIH

SEQ ID NO: 906 - protein, 13 aa, Artificial Sequence
  chemically synthesized
ISSGLLSGRSDQH

SEQ ID NO: 907 - protein, 13 aa, Artificial Sequence
  chemically synthesized
ISSGLLSGRSDTH

SEQ ID NO: 908 - protein, 13 aa, Artificial Sequence
  chemically synthesized
ISSGLLSGRSDYH

SEQ ID NO: 909 - protein, 13 aa, Artificial Sequence
  chemically synthesized
ISSGLLSGRSDNP

SEQ ID NO: 910 - protein, 13 aa, Artificial Sequence
  chemically synthesized
ISSGLLSGRSANP

SEQ ID NO: 911 - protein, 13 aa, Artificial Sequence
  chemically synthesized
ISSGLLSGRSANI

SEQ ID NO: 912 - protein, 18 aa, Artificial Sequence
  chemically synthesized
AVGLLAPPGGLSGRSDDH

SEQ ID NO: 913 - protein, 18 aa, Artificial Sequence
  chemically synthesized
AVGLLAPPGGLSGRSDIH

SEQ ID NO: 914 - protein, 18 aa, Artificial Sequence
  chemically synthesized
AVGLLAPPGGLSGRSDQH

SEQ ID NO: 915 - protein, 18 aa, Artificial Sequence
  chemically synthesized
AVGLLAPPGGLSGRSDTH

SEQ ID NO: 916 - protein, 18 aa, Artificial Sequence
  chemically synthesized
AVGLLAPPGGLSGRSDYH

SEQ ID NO: 917 - protein, 18 aa, Artificial Sequence
  chemically synthesized
AVGLLAPPGGLSGRSDNP

SEQ ID NO: 918 - protein, 18 aa, Artificial Sequence
  chemically synthesized
AVGLLAPPGGLSGRSANP

SEQ ID NO: 919 - protein, 18 aa, Artificial Sequence
  chemically synthesized
AVGLLAPPGGLSGRSANI

SEQ ID NO: 920 - protein, 13 aa, Artificial Sequence
  chemically synthesized
ISSGLLSGRSDNI

SEQ ID NO: 921 - protein, 18 aa, Artificial Sequence
  chemically synthesized
AVGLLAPPGGLSGRSDNI

SEQ ID NO: 922 - protein, 6 aa, Artificial Sequence
  chemically synthesized
GGSGGS

SEQ ID NO: 923 - protein, 6 aa, Artificial Sequence
  chemically synthesized
QGQSGS

SEQ ID NO: 924 - protein, 7 aa, Artificial Sequence
  chemically synthesized
QGQSGQG

SEQ ID NO: 925 - protein, 5 aa, Artificial Sequence
  chemically synthesized
QSGQG

SEQ ID NO: 926 - protein, 4 aa, Artificial Sequence
  chemically synthesized
SGQG

SEQ ID NO: 927 - protein, 3 aa, Artificial Sequence
  chemically synthesized
GQG

SEQ ID NO: 928 - protein, 2 aa, Artificial Sequence
  chemically synthesized
QG

SEQ ID NO: 929 - DNA, 18 bp, Artificial Sequence
  chemically synthesized
caaggtcagtctggatcc

SEQ ID NO: 930 - DNA, 516 bp, Artificial Sequence
  chemically synthesized
tattgcgaggttagtgagctgtttgttcttccttggtgcatgggtggaggtggctcgagcggtggcagcggtggctctggtggtactagcacctctggtcgttccgctaacccacgtggcggcggttctgacatccagatgacccagagccccagcagcctgtctgctagcgtgggcgacagagtgaccatcacctgtagagccagccagagcatcagcagctacctgaactggtatcagcagaagcccggcaaggcccccaaactgctgatctacgccgccagctctctgcagtctggcgtgcccagcagattttccggcagcggctctggcaccgacttcaccctgaccatcagctccctgcagcccgaggacttcgccacctactactgccagcaggacaacggctaccccagcacctttggcggaggtaccaaggtggaaatcaagcgttgtgaggccactcacaagacatcaacttcacccattgtcaagagcttcaacaggaatgagtgt

SEQ ID NO: 931 - protein, 151 aa, Artificial Sequence
  chemically synthesized
YCEVSELFVLPWCMGGGGSSGGSGGSGGTSTSGRSANPRGGGSDIQMTQSPSSLSASVGDRVTITCRASQSISSYLNWYQQKPGKAPKLLIYAASSLQSGVPSRFSGSGSGTDFTLTISSLQPEDFATYYCQQDNGYPSTFGGGTKVEIKR

SEQ ID NO: 932 - DNA, 516 bp, Artificial Sequence
  chemically synthesized
tcttgccttatgcatccgcattatgctcatgattattgctatgttggaggtggctcgagcggtggcagcggtggctctggtggtactagcacctctggtcgttccgctaacccacgtggcggcggttctgacatccagatgacccagagccccagcagcctgtctgctagcgtgggcgacagagtgaccatcacctgtagagccagccagagcatcagcagctacctgaactggtatcagcagaagcccggcaaggcccccaaactgctgatctacgccgccagctctctgcagtctggcgtgcccagcagattttccggcagcggctctggcaccgacttcaccctgaccatcagctccctgcagcccgaggacttcgccacctactactgccagcaggacaacggctaccccagcacctttggcggaggtaccaaggtggaaatcaagcgttgtgaggccactcacaagacatcaacttcacccattgtcaagagcttcaacaggaatgagtgt

SEQ ID NO: 933 - protein, 151 aa, Artificial Sequence
  chemically synthesized
SCLMHPHYAHDYCYVGGGSSGGSGGSGGTSTSGRSANPRGGGSDIQMTQSPSSLSASVGDRVTITCRASQSISSYLNWYQQKPGKAPKLLIYAASSLQSGVPSRFSGSGSGTDFTLTISSLQPEDFATYYCQQDNGYPSTFGGGTKVEIKR

SEQ ID NO: 934 - DNA, 516 bp, Artificial Sequence
  chemically synthesized
ttgtgcgaggttttgatgttgttgcagcatccgtggtgcatggggggaggtggctcgagcggtggcagcggtggctctggtggtactagcacctctggtcgttccgctaacccacgtggcggcggttctgacatccagatgacccagagccccagcagcctgtctgctagcgtgggcgacagagtgaccatcacctgtagagccagccagagcatcagcagctacctgaactggtatcagcagaagcccggcaaggcccccaaactgctgatctacgccgccagctctctgcagtctggcgtgcccagcagattttccggcagcggctctggcaccgacttcaccctgaccatcagctccctgcagcccgaggacttcgccacctactactgccagcaggacaacggctaccccagcacctttggcggaggtaccaaggtggaaatcaagcgttgtgaggccactcacaagacatcaacttcacccattgtcaagagcttcaacaggaatgagtgt

SEQ ID NO: 935 - protein, 151 aa, Artificial Sequence
  chemically synthesized
LCEVLMLLQHPWCMGGGGSSGGSGGSGGTSTSGRSANPRGGGSDIQMTQSPSSLSASVGDRVTITCRASQSISSYLNWYQQKPGKAPKLLIYAASSLQSGVPSRFSGSGSGTDFTLTISSLQPEDFATYYCQQDNGYPSTFGGGTKVEIKR

SEQ ID NO: 936 - DNA, 516 bp, Artificial Sequence
  chemically synthesized
attgcgtgccggcattttatggagcagttgccgttttgccatcatggaggtggctcgagcggtggcagcggtggctctggtggtactagcacctctggtcgttccgctaacccacgtggcggcggttctgacatccagatgacccagagccccagcagcctgtctgctagcgtgggcgacagagtgaccatcacctgtagagccagccagagcatcagcagctacctgaactggtatcagcagaagcccggcaaggcccccaaactgctgatctacgccgccagctctctgcagtctggcgtgcccagcagattttccggcagcggctctggcaccgacttcaccctgaccatcagctccctgcagcccgaggacttcgccacctactactgccagcaggacaacggctaccccagcacctttggcggaggtaccaaggtggaaatcaagcgttgtgaggccactcacaagacatcaacttcacccattgtcaagagcttcaacaggaatgagtgt

SEQ ID NO: 937 - protein, 151 aa, Artificial Sequence
  chemically synthesized
IACRHFMEQLPFCHHGGGSSGGSGGSGGTSTSGRSANPRGGGSDIQMTQSPSSLSASVGDRVTITCRASQSISSYLNWYQQKPGKAPKLLIYAASSLQSGVPSRFSGSGSGTDFTLTISSLQPEDFATYYCQQDNGYPSTFGGGTKVEIKR

SEQ ID NO: 938 - DNA, 516 bp, Artificial Sequence
  chemically synthesized
tttggtcctaggtgcggtgaggcttctacttgcgttccgtatgagggaggtggctcgagcggtggcagcggtggctctggtggtactagcacctctggtcgttccgctaacccacgtggcggcggttctgacatccagatgacccagagccccagcagcctgtctgctagcgtgggcgacagagtgaccatcacctgtagagccagccagagcatcagcagctacctgaactggtatcagcagaagcccggcaaggcccccaaactgctgatctacgccgccagctctctgcagtctggcgtgcccagcagattttccggcagcggctctggcaccgacttcaccctgaccatcagctccctgcagcccgaggacttcgccacctactactgccagcaggacaacggctaccccagcacctttggcggaggtaccaaggtggaaatcaagcgttgtgaggccactcacaagacatcaacttcacccattgtcaagagcttcaacaggaatgagtgt

SEQ ID NO: 939 - protein, 151 aa, Artificial Sequence
  chemically synthesized
FGPRCGEASTCVPYEGGGSSGGSGGSGGTSTSGRSANPRGGGSDIQMTQSPSSLSASVGDRVTITCRASQSISSYLNWYQQKPGKAPKLLIYAASSLQSGVPSRFSGSGSGTDFTLTISSLQPEDFATYYCQQDNGYPSTFGGGTKVEIKR

SEQ ID NO: 940 - DNA, 516 bp, Artificial Sequence
  chemically synthesized
attctttattgcgatagttggggggcggggtgcttgacgcggccgggaggtggctcgagcggtggcagcggtggctctggtggtactagcacctctggtcgttccgctaacccacgtggcggcggttctgacatccagatgacccagagccccagcagcctgtctgctagcgtgggcgacagagtgaccatcacctgtagagccagccagagcatcagcagctacctgaactggtatcagcagaagcccggcaaggcccccaaactgctgatctacgccgccagctctctgcagtctggcgtgcccagcagattttccggcagcggctctggcaccgacttcaccctgaccatcagctccctgcagcccgaggacttcgccacctactactgccagcaggacaacggctaccccagcacctttggcggaggtaccaaggtggaaatcaagcgttgtgaggccactcacaagacatcaacttcacccattgtcaagagcttcaacaggaatgagtgt

SEQ ID NO: 941 - protein, 151 aa, Artificial Sequence
  chemically synthesized
ILYCDSWGAGCLTRPGGGSSGGSGGSGGTSTSGRSANPRGGGSDIQMTQSPSSLSASVGDRVTITCRASQSISSYLNWYQQKPGKAPKLLIYAASSLQSGVPSRFSGSGSGTDFTLTISSLQPEDFATYYCQQDNGYPSTFGGGTKVEIKR

SEQ ID NO: 942 - DNA, 516 bp, Artificial Sequence
  chemically synthesized
gggattgcgttgtgcccgtctcatttttgccagctgcctcagactggaggtggctcgagcggtggcagcggtggctctggtggtactagcacctctggtcgttccgctaacccacgtggcggcggttctgacatccagatgacccagagccccagcagcctgtctgctagcgtgggcgacagagtgaccatcacctgtagagccagccagagcatcagcagctacctgaactggtatcagcagaagcccggcaaggcccccaaactgctgatctacgccgccagctctctgcagtctggcgtgcccagcagattttccggcagcggctctggcaccgacttcaccctgaccatcagctccctgcagcccgaggacttcgccacctactactgccagcaggacaacggctaccccagcacctttggcggaggtaccaaggtggaaatcaagcgttgtgaggccactcacaagacatcaacttcacccattgtcaagagcttcaacaggaatgagtgt

SEQ ID NO: 943 - protein, 151 aa, Artificial Sequence
  chemically synthesized
GIALCPSHFCQLPQTGGGSSGGSGGSGGTSTSGRSANPRGGGSDIQMTQSPSSLSASVGDRVTITCRASQSISSYLNWYQQKPGKAPKLLIYAASSLQSGVPSRFSGSGSGTDFTLTISSLQPEDFATYYCQQDNGYPSTFGGGTKVEIKR

SEQ ID NO: 944 - DNA, 516 bp, Artificial Sequence
  chemically synthesized
gatgggccgcgttgctttgtgtcgggggagtgctctccgattggtggaggtggctcgagcggtggcagcggtggctctggtggtactagcacctctggtcgttccgctaacccacgtggcggcggttctgacatccagatgacccagagccccagcagcctgtctgctagcgtgggcgacagagtgaccatcacctgtagagccagccagagcatcagcagctacctgaactggtatcagcagaagcccggcaaggcccccaaactgctgatctacgccgccagctctctgcagtctggcgtgcccagcagattttccggcagcggctctggcaccgacttcaccctgaccatcagctccctgcagcccgaggacttcgccacctactactgccagcaggacaacggctaccccagcacctttggcggaggtaccaaggtggaaatcaagcgttgtgaggccactcacaagacatcaacttcacccattgtcaagagcttcaacaggaatgagtgt

SEQ ID NO: 945 - protein, 151 aa, Artificial Sequence
  chemically synthesized
DGPRCFVSGECSPIGGGGSSGGSGGSGGTSTSGRSANPRGGGSDIQMTQSPSSLSASVGDRVTITCRASQSISSYLNWYQQKPGKAPKLLIYAASSLQSGVPSRFSGSGSGTDFTLTISSLQPEDFATYYCQQDNGYPSTFGGGTKVEIKR

SEQ ID NO: 946 - DNA, 516 bp, Artificial Sequence
  chemically synthesized
ttgtgctataagctggattatgatgataggtcttattgccatattggaggtggctcgagcggtggcagcggtggctctggtggtactagcacctctggtcgttccgctaacccacgtggcggcggttctgacatccagatgacccagagccccagcagcctgtctgctagcgtgggcgacagagtgaccatcacctgtagagccagccagagcatcagcagctacctgaactggtatcagcagaagcccggcaaggcccccaaactgctgatctacgccgccagctctctgcagtctggcgtgcccagcagattttccggcagcggctctggcaccgacttcaccctgaccatcagctccctgcagcccgaggacttcgccacctactactgccagcaggacaacggctaccccagcacctttggcggaggtaccaaggtggaaatcaagcgttgtgaggccactcacaagacatcaacttcacccattgtcaagagcttcaacaggaatgagtgt

SEQ ID NO: 947 - protein, 151 aa, Artificial Sequence
  chemically synthesized
LCYKLDYDDRSYCHIGGGSSGGSGGSGGTSTSGRSANPRGGGSDIQMTQSPSSLSASVGDRVTITCRASQSISSYLNWYQQKPGKAPKLLIYAASSLQSGVPSRFSGSGSGTDFTLTISSLQPEDFATYYCQQDNGYPSTFGGGTKVEIKR

SEQ ID NO: 948 - DNA, 516 bp, Artificial Sequence
  chemically synthesized
ccgtgccatccgcatccttatgatgctcgtccttattgcaatgtgggaggtggctcgagcggtggcagcggtggctctggtggtactagcacctctggtcgttccgctaacccacgtggcggcggttctgacatccagatgacccagagccccagcagcctgtctgctagcgtgggcgacagagtgaccatcacctgtagagccagccagagcatcagcagctacctgaactggtatcagcagaagcccggcaaggcccccaaactgctgatctacgccgccagctctctgcagtctggcgtgcccagcagattttccggcagcggctctggcaccgacttcaccctgaccatcagctccctgcagcccgaggacttcgccacctactactgccagcaggacaacggctaccccagcacctttggcggaggtaccaaggtggaaatcaagcgttgtgaggccactcacaagacatcaacttcacccattgtcaagagcttcaacaggaatgagtgt

SEQ ID NO: 949 - protein, 151 aa, Artificial Sequence
  chemically synthesized
PCHPHPYDARPYCNVGGGSSGGSGGSGGTSTSGRSANPRGGGSDIQMTQSPSSLSASVGDRVTITCRASQSISSYLNWYQQKPGKAPKLLIYAASSLQSGVPSRFSGSGSGTDFTLTISSLQPEDFATYYCQQDNGYPSTFGGGTKVEIKR

SEQ ID NO: 950 - DNA, 516 bp, Artificial Sequence
  chemically synthesized
ccttgctattggcatcctttttttgcgtataggtattgcaatactggaggtggctcgagcggtggcagcggtggctctggtggtactagcacctctggtcgttccgctaacccacgtggcggcggttctgacatccagatgacccagagccccagcagcctgtctgctagcgtgggcgacagagtgaccatcacctgtagagccagccagagcatcagcagctacctgaactggtatcagcagaagcccggcaaggcccccaaactgctgatctacgccgccagctctctgcagtctggcgtgcccagcagattttccggcagcggctctggcaccgacttcaccctgaccatcagctccctgcagcccgaggacttcgccacctactactgccagcaggacaacggctaccccagcacctttggcggaggtaccaaggtggaaatcaagcgttgtgaggccactcacaagacatcaacttcacccattgtcaagagcttcaacaggaatgagtgt

SEQ ID NO: 951 - protein, 151 aa, Artificial Sequence
  chemically synthesized
PCYWHPFFAYRYCNTGGGSSGGSGGSGGTSTSGRSANPRGGGSDIQMTQSPSSLSASVGDRVTITCRASQSISSYLNWYQQKPGKAPKLLIYAASSLQSGVPSRFSGSGSGTDFTLTISSLQPEDFATYYCQQDNGYPSTFGGGTKVEIKR

SEQ ID NO: 952 - DNA, 516 bp, Artificial Sequence
  chemically synthesized
gtttgctattatatggattggttggggcggaattggtgctcttcgggaggtggctcgagcggtggcagcggtggctctggtggtactagcacctctggtcgttccgctaacccacgtggcggcggttctgacatccagatgacccagagccccagcagcctgtctgctagcgtgggcgacagagtgaccatcacctgtagagccagccagagcatcagcagctacctgaactggtatcagcagaagcccggcaaggcccccaaactgctgatctacgccgccagctctctgcagtctggcgtgcccagcagattttccggcagcggctctggcaccgacttcaccctgaccatcagctccctgcagcccgaggacttcgccacctactactgccagcaggacaacggctaccccagcacctttggcggaggtaccaaggtggaaatcaagcgttgtgaggccactcacaagacatcaacttcacccattgtcaagagcttcaacaggaatgagtgt

SEQ ID NO: 953 - protein, 151 aa, Artificial Sequence
  chemically synthesized
VCYYMDWLGRNWCSSGGGSSGGSGGSGGTSTSGRSANPRGGGSDIQMTQSPSSLSASVGDRVTITCRASQSISSYLNWYQQKPGKAPKLLIYAASSLQSGVPSRFSGSGSGTDFTLTISSLQPEDFATYYCQQDNGYPSTFGGGTKVEIKR

SEQ ID NO: 954 - DNA, 516 bp, Artificial Sequence
  chemically synthesized
ctgtgcgatctgtttaagttgcgtgagtttccttattgcatggggggaggtggctcgagcggtggcagcggtggctctggtggtactagcacctctggtcgttccgctaacccacgtggcggcggttctgacatccagatgacccagagccccagcagcctgtctgctagcgtgggcgacagagtgaccatcacctgtagagccagccagagcatcagcagctacctgaactggtatcagcagaagcccggcaaggcccccaaactgctgatctacgccgccagctctctgcagtctggcgtgcccagcagattttccggcagcggctctggcaccgacttcaccctgaccatcagctccctgcagcccgaggacttcgccacctactactgccagcaggacaacggctaccccagcacctttggcggaggtaccaaggtggaaatcaagcgttgtgaggccactcacaagacatcaacttcacccattgtcaagagcttcaacaggaatgagtgt

SEQ ID NO: 955 - protein, 151 aa, Artificial Sequence
  chemically synthesized
LCDLFKLREFPYCMGGGGSSGGSGGSGGTSTSGRSANPRGGGSDIQMTQSPSSLSASVGDRVTITCRASQSISSYLNWYQQKPGKAPKLLIYAASSLQSGVPSRFSGSGSGTDFTLTISSLQPEDFATYYCQQDNGYPSTFGGGTKVEIKR

SEQ ID NO: 956 - DNA, 516 bp, Artificial Sequence
  chemically synthesized
tatcttccgtgccattttgttccgattggggcttgcaataataagggaggtggctcgagcggtggcagcggtggctctggtggtactagcacctctggtcgttccgctaacccacgtggcggcggttctgacatccagatgacccagagccccagcagcctgtctgctagcgtgggcgacagagtgaccatcacctgtagagccagccagagcatcagcagctacctgaactggtatcagcagaagcccggcaaggcccccaaactgctgatctacgccgccagctctctgcagtctggcgtgcccagcagattttccggcagcggctctggcaccgacttcaccctgaccatcagctccctgcagcccgaggacttcgccacctactactgccagcaggacaacggctaccccagcacctttggcggaggtaccaaggtggaaatcaagcgttgtgaggccactcacaagacatcaacttcacccattgtcaagagcttcaacaggaatgagtgt

SEQ ID NO: 957 - protein, 151 aa, Artificial Sequence
  chemically synthesized
YLPCHFVPIGACNNKGGGSSGGSGGSGGTSTSGRSANPRGGGSDIQMTQSPSSLSASVGDRVTITCRASQSISSYLNWYQQKPGKAPKLLIYAASSLQSGVPSRFSGSGSGTDFTLTISSLQPEDFATYYCQQDNGYPSTFGGGTKVEIKR

SEQ ID NO: 958 - DNA, 516 bp, Artificial Sequence
  chemically synthesized
attttttgccatatgggtgttgtggttcctcagtgcgcgaattatggaggtggctcgagcggtggcagcggtggctctggtggtactagcacctctggtcgttccgctaacccacgtggcggcggttctgacatccagatgacccagagccccagcagcctgtctgctagcgtgggcgacagagtgaccatcacctgtagagccagccagagcatcagcagctacctgaactggtatcagcagaagcccggcaaggcccccaaactgctgatctacgccgccagctctctgcagtctggcgtgcccagcagattttccggcagcggctctggcaccgacttcaccctgaccatcagctccctgcagcccgaggacttcgccacctactactgccagcaggacaacggctaccccagcacctttggcggaggtaccaaggtggaaatcaagcgttgtgaggccactcacaagacatcaacttcacccattgtcaagagcttcaacaggaatgagtgt

SEQ ID NO: 959 - protein, 151 aa, Artificial Sequence
  chemically synthesized
IFCHMGVVVPQCANYGGGSSGGSGGSGGTSTSGRSANPRGGGSDIQMTQSPSSLSASVGDRVTITCRASQSISSYLNWYQQKPGKAPKLLIYAASSLQSGVPSRFSGSGSGTDFTLTISSLQPEDFATYYCQQDNGYPSTFGGGTKVEIKR

SEQ ID NO: 960 - DNA, 516 bp, Artificial Sequence
  chemically synthesized
gcgtgccatccgcatccttatgatgctcgtccttattgcaatgtgggaggtggctcgagcggtggcagcggtggctctggtggtactagcacctctggtcgttccgctaacccacgtggcggcggttctgacatccagatgacccagagccccagcagcctgtctgctagcgtgggcgacagagtgaccatcacctgtagagccagccagagcatcagcagctacctgaactggtatcagcagaagcccggcaaggcccccaaactgctgatctacgccgccagctctctgcagtctggcgtgcccagcagattttccggcagcggctctggcaccgacttcaccctgaccatcagctccctgcagcccgaggacttcgccacctactactgccagcaggacaacggctaccccagcacctttggcggaggtaccaaggtggaaatcaagcgttgtgaggccactcacaagacatcaacttcacccattgtcaagagcttcaacaggaatgagtgt

SEQ ID NO: 961 - protein, 151 aa, Artificial Sequence
  chemically synthesized
ACHPHPYDARPYCNVGGGSSGGSGGSGGTSTSGRSANPRGGGSDIQMTQSPSSLSASVGDRVTITCRASQSISSYLNWYQQKPGKAPKLLIYAASSLQSGVPSRFSGSGSGTDFTLTISSLQPEDFATYYCQQDNGYPSTFGGGTKVEIKR

SEQ ID NO: 962 - DNA, 516 bp, Artificial Sequence
  chemically synthesized
ccgtgccatccggctccttatgatgctcgtccttattgcaatgtgggaggtggctcgagcggtggcagcggtggctctggtggtactagcacctctggtcgttccgctaacccacgtggcggcggttctgacatccagatgacccagagccccagcagcctgtctgctagcgtgggcgacagagtgaccatcacctgtagagccagccagagcatcagcagctacctgaactggtatcagcagaagcccggcaaggcccccaaactgctgatctacgccgccagctctctgcagtctggcgtgcccagcagattttccggcagcggctctggcaccgacttcaccctgaccatcagctccctgcagcccgaggacttcgccacctactactgccagcaggacaacggctaccccagcacctttggcggaggtaccaaggtggaaatcaagcgttgtgaggccactcacaagacatcaacttcacccattgtcaagagcttcaacaggaatgagtgt

SEQ ID NO: 963 - protein, 151 aa, Artificial Sequence
  chemically synthesized
PCHPAPYDARPYCNVGGGSSGGSGGSGGTSTSGRSANPRGGGSDIQMTQSPSSLSASVGDRVTITCRASQSISSYLNWYQQKPGKAPKLLIYAASSLQSGVPSRFSGSGSGTDFTLTISSLQPEDFATYYCQQDNGYPSTFGGGTKVEIKR

SEQ ID NO: 964 - DNA, 516 bp, Artificial Sequence
  chemically synthesized
ccgtgccatccgcatgcttatgatgctcgtccttattgcaatgtgggaggtggctcgagcggtggcagcggtggctctggtggtactagcacctctggtcgttccgctaacccacgtggcggcggttctgacatccagatgacccagagccccagcagcctgtctgctagcgtgggcgacagagtgaccatcacctgtagagccagccagagcatcagcagctacctgaactggtatcagcagaagcccggcaaggcccccaaactgctgatctacgccgccagctctctgcagtctggcgtgcccagcagattttccggcagcggctctggcaccgacttcaccctgaccatcagctccctgcagcccgaggacttcgccacctactactgccagcaggacaacggctaccccagcacctttggcggaggtaccaaggtggaaatcaagcgttgtgaggccactcacaagacatcaacttcacccattgtcaagagcttcaacaggaatgagtgt

SEQ ID NO: 965 - protein, 151 aa, Artificial Sequence
  chemically synthesized
PCHPHAYDARPYCNVGGGSSGGSGGSGGTSTSGRSANPRGGGSDIQMTQSPSSLSASVGDRVTITCRASQSISSYLNWYQQKPGKAPKLLIYAASSLQSGVPSRFSGSGSGTDFTLTISSLQPEDFATYYCQQDNGYPSTFGGGTKVEIKR

SEQ ID NO: 966 - DNA, 516 bp, Artificial Sequence
  chemically synthesized
ccgtgccatccgcatcctgctgatgctcgtccttattgcaatgtgggaggtggctcgagcggtggcagcggtggctctggtggtactagcacctctggtcgttccgctaacccacgtggcggcggttctgacatccagatgacccagagccccagcagcctgtctgctagcgtgggcgacagagtgaccatcacctgtagagccagccagagcatcagcagctacctgaactggtatcagcagaagcccggcaaggcccccaaactgctgatctacgccgccagctctctgcagtctggcgtgcccagcagattttccggcagcggctctggcaccgacttcaccctgaccatcagctccctgcagcccgaggacttcgccacctactactgccagcaggacaacggctaccccagcacctttggcggaggtaccaaggtggaaatcaagcgttgtgaggccactcacaagacatcaacttcacccattgtcaagagcttcaacaggaatgagtgt

SEQ ID NO: 967 - protein, 151 aa, Artificial Sequence
  chemically synthesized
PCHPHPADARPYCNVGGGSSGGSGGSGGTSTSGRSANPRGGGSDIQMTQSPSSLSASVGDRVTITCRASQSISSYLNWYQQKPGKAPKLLIYAASSLQSGVPSRFSGSGSGTDFTLTISSLQPEDFATYYCQQDNGYPSTFGGGTKVEIKR

SEQ ID NO: 968 - DNA, 516 bp, Artificial Sequence
  chemically synthesized
ccgtgccatccgcatccttatgctgctcgtccttattgcaatgtgggaggtggctcgagcggtggcagcggtggctctggtggtactagcacctctggtcgttccgctaacccacgtggcggcggttctgacatccagatgacccagagccccagcagcctgtctgctagcgtgggcgacagagtgaccatcacctgtagagccagccagagcatcagcagctacctgaactggtatcagcagaagcccggcaaggcccccaaactgctgatctacgccgccagctctctgcagtctggcgtgcccagcagattttccggcagcggctctggcaccgacttcaccctgaccatcagctccctgcagcccgaggacttcgccacctactactgccagcaggacaacggctaccccagcacctttggcggaggtaccaaggtggaaatcaagcgttgtgaggccactcacaagacatcaacttcacccattgtcaagagcttcaacaggaatgagtgt

SEQ ID NO: 969 - protein, 151 aa, Artificial Sequence
  chemically synthesized
PCHPHPYAARPYCNVGGGSSGGSGGSGGTSTSGRSANPRGGGSDIQMTQSPSSLSASVGDRVTITCRASQSISSYLNWYQQKPGKAPKLLIYAASSLQSGVPSRFSGSGSGTDFTLTISSLQPEDFATYYCQQDNGYPSTFGGGTKVEIKR

SEQ ID NO: 970 - DNA, 516 bp, Artificial Sequence
  chemically synthesized
ccgtgccatccgcatccttatgatgctgctccttattgcaatgtgggaggtggctcgagcggtggcagcggtggctctggtggtactagcacctctggtcgttccgctaacccacgtggcggcggttctgacatccagatgacccagagccccagcagcctgtctgctagcgtgggcgacagagtgaccatcacctgtagagccagccagagcatcagcagctacctgaactggtatcagcagaagcccggcaaggcccccaaactgctgatctacgccgccagctctctgcagtctggcgtgcccagcagattttccggcagcggctctggcaccgacttcaccctgaccatcagctccctgcagcccgaggacttcgccacctactactgccagcaggacaacggctaccccagcacctttggcggaggtaccaaggtggaaatcaagcgttgtgaggccactcacaagacatcaacttcacccattgtcaagagcttcaacaggaatgagtgt

SEQ ID NO: 971 - protein, 151 aa, Artificial Sequence
  chemically synthesized
PCHPHPYDAAPYCNVGGGSSGGSGGSGGTSTSGRSANPRGGGSDIQMTQSPSSLSASVGDRVTITCRASQSISSYLNWYQQKPGKAPKLLIYAASSLQSGVPSRFSGSGSGTDFTLTISSLQPEDFATYYCQQDNGYPSTFGGGTKVEIKR

SEQ ID NO: 972 - DNA, 516 bp, Artificial Sequence
  chemically synthesized
ccgtgccatccgcatccttatgatgctcgtcctgcttgcaatgtgggaggtggctcgagcggtggcagcggtggctctggtggtactagcacctctggtcgttccgctaacccacgtggcggcggttctgacatccagatgacccagagccccagcagcctgtctgctagcgtgggcgacagagtgaccatcacctgtagagccagccagagcatcagcagctacctgaactggtatcagcagaagcccggcaaggcccccaaactgctgatctacgccgccagctctctgcagtctggcgtgcccagcagattttccggcagcggctctggcaccgacttcaccctgaccatcagctccctgcagcccgaggacttcgccacctactactgccagcaggacaacggctaccccagcacctttggcggaggtaccaaggtggaaatcaagcgttgtgaggccactcacaagacatcaacttcacccattgtcaagagcttcaacaggaatgagtgt

SEQ ID NO: 973 - protein, 151 aa, Artificial Sequence
  chemically synthesized
PCHPHPYDARPACNVGGGSSGGSGGSGGTSTSGRSANPRGGGSDIQMTQSPSSLSASVGDRVTITCRASQSISSYLNWYQQKPGKAPKLLIYAASSLQSGVPSRFSGSGSGTDFTLTISSLQPEDFATYYCQQDNGYPSTFGGGTKVEIKR

SEQ ID NO: 974 - DNA, 516 bp, Artificial Sequence
  chemically synthesized
ccgtgccatccgcatccttatgatgctcgtccttattgcgctgtgggaggtggctcgagcggtggcagcggtggctctggtggtactagcacctctggtcgttccgctaacccacgtggcggcggttctgacatccagatgacccagagccccagcagcctgtctgctagcgtgggcgacagagtgaccatcacctgtagagccagccagagcatcagcagctacctgaactggtatcagcagaagcccggcaaggcccccaaactgctgatctacgccgccagctctctgcagtctggcgtgcccagcagattttccggcagcggctctggcaccgacttcaccctgaccatcagctccctgcagcccgaggacttcgccacctactactgccagcaggacaacggctaccccagcacctttggcggaggtaccaaggtggaaatcaagcgttgtgaggccactcacaagacatcaacttcacccattgtcaagagcttcaacaggaatgagtgt

SEQ ID NO: 975 - protein, 151 aa, Artificial Sequence
  chemically synthesized
PCHPHPYDARPYCAVGGGSSGGSGGSGGTSTSGRSANPRGGGSDIQMTQSPSSLSASVGDRVTITCRASQSISSYLNWYQQKPGKAPKLLIYAASSLQSGVPSRFSGSGSGTDFTLTISSLQPEDFATYYCQQDNGYPSTFGGGTKVEIKR

SEQ ID NO: 976 - DNA, 516 bp, Artificial Sequence
  chemically synthesized
ccgtgccatgcgcatccttatgatgctcgtccttattgcaatgtgggaggtggctcgagcggtggcagcggtggctctggtggtactagcacctctggtcgttccgctaacccacgtggcggcggttctgacatccagatgacccagagccccagcagcctgtctgctagcgtgggcgacagagtgaccatcacctgtagagccagccagagcatcagcagctacctgaactggtatcagcagaagcccggcaaggcccccaaactgctgatctacgccgccagctctctgcagtctggcgtgcccagcagattttccggcagcggctctggcaccgacttcaccctgaccatcagctccctgcagcccgaggacttcgccacctactactgccagcaggacaacggctaccccagcacctttggcggaggtaccaaggtggaaatcaagcgttgtgaggccactcacaagacatcaacttcacccattgtcaagagcttcaacaggaatgagtgt

SEQ ID NO: 977 - protein, 151 aa, Artificial Sequence
  chemically synthesized
PCHAHPYDARPYCNVGGGSSGGSGGSGGTSTSGRSANPRGGGSDIQMTQSPSSLSASVGDRVTITCRASQSISSYLNWYQQKPGKAPKLLIYAASSLQSGVPSRFSGSGSGTDFTLTISSLQPEDFATYYCQQDNGYPSTFGGGTKVEIKR

SEQ ID NO: 978 - DNA, 516 bp, Artificial Sequence
  chemically synthesized
ccgtgccatccgcatccttatgatgctcgtgcttattgcaatgtgggaggtggctcgagcggtggcagcggtggctctggtggtactagcacctctggtcgttccgctaacccacgtggcggcggttctgacatccagatgacccagagccccagcagcctgtctgctagcgtgggcgacagagtgaccatcacctgtagagccagccagagcatcagcagctacctgaactggtatcagcagaagcccggcaaggcccccaaactgctgatctacgccgccagctctctgcagtctggcgtgcccagcagattttccggcagcggctctggcaccgacttcaccctgaccatcagctccctgcagcccgaggacttcgccacctactactgccagcaggacaacggctaccccagcacctttggcggaggtaccaaggtggaaatcaagcgttgtgaggccactcacaagacatcaacttcacccattgtcaagagcttcaacaggaatgagtgt

SEQ ID NO: 979 - protein, 151 aa, Artificial Sequence
  chemically synthesized
PCHPHPYDARAYCNVGGGSSGGSGGSGGTSTSGRSANPRGGGSDIQMTQSPSSLSASVGDRVTITCRASQSISSYLNWYQQKPGKAPKLLIYAASSLQSGVPSRFSGSGSGTDFTLTISSLQPEDFATYYCQQDNGYPSTFGGGTKVEIKR

SEQ ID NO: 980 - DNA, 474 bp, Artificial Sequence
  chemically synthesized
ggaggtggctcgagcggtggcagcggtggctctggtggtattagcagtggtctgttaagcggtcgtagcgataatcatggcggttctgacatccagatgacccagagccccagcagcctgtctgctagcgtgggcgacagagtgaccatcacctgtagagccagccagagcatcagcagctacctgaactggtatcagcagaagcccggcaaggcccccaaactgctgatctacgccgccagctctctgcagtctggcgtgcccagcagattttccggcagcggctctggcaccgacttcaccctgaccatcagctccctgcagcccgaggacttcgccacctactactgccagcaggacaacggctaccccagcacctttggcggaggtaccaaggtggaaatcaagcgttgtgaggccactcacaagacatcaacttcacccattgtcaagagcttcaacaggaatgagtgt

SEQ ID NO: 981 - protein, 152 aa, Artificial Sequence
  chemically synthesized
LCEVLMLLQHPWCMGGGGSSGGSGGSGGISSGLLSGRSDNHGGSDIQMTQSPSSLSASVGDRVTITCRASQSISSYLNWYQQKPGKAPKLLIYAASSLQSGVPSRFSGSGSGTDFTLTISSLQPEDFATYYCQQDNGYPSTFGGGTKVEIKR

SEQ ID NO: 982 - DNA, 474 bp, Artificial Sequence; identical to SEQ ID NO: 980
  chemically synthesized

SEQ ID NO: 983 - protein, 152 aa, Artificial Sequence
  chemically synthesized
ILYCDSWGAGCLTRPGGGSSGGSGGSGGISSGLLSGRSDNHGGSDIQMTQSPSSLSASVGDRVTITCRASQSISSYLNWYQQKPGKAPKLLIYAASSLQSGVPSRFSGSGSGTDFTLTISSLQPEDFATYYCQQDNGYPSTFGGGTKVEIKR

SEQ ID NO: 984 - DNA, 474 bp, Artificial Sequence; identical to SEQ ID NO: 980
  chemically synthesized

SEQ ID NO: 985 - protein, 152 aa, Artificial Sequence
  chemically synthesized
GIALCPSHFCQLPQTGGGSSGGSGGSGGISSGLLSGRSDNHGGSDIQMTQSPSSLSASVGDRVTITCRASQSISSYLNWYQQKPGKAPKLLIYAASSLQSGVPSRFSGSGSGTDFTLTISSLQPEDFATYYCQQDNGYPSTFGGGTKVEIKR

SEQ ID NO: 986 - DNA, 474 bp, Artificial Sequence; identical to SEQ ID NO: 980
  chemically synthesized

SEQ ID NO: 987 - protein, 152 aa, Artificial Sequence
  chemically synthesized
PCHPHPYDARPYCNVGGGSSGGSGGSGGISSGLLSGRSDNHGGSDIQMTQSPSSLSASVGDRVTITCRASQSISSYLNWYQQKPGKAPKLLIYAASSLQSGVPSRFSGSGSGTDFTLTISSLQPEDFATYYCQQDNGYPSTFGGGTKVEIKR

SEQ ID NO: 988 - DNA, 474 bp, Artificial Sequence; identical to SEQ ID NO: 980
  chemically synthesized

SEQ ID NO: 989 - protein, 152 aa, Artificial Sequence
  chemically synthesized
YLPCHFVPIGACNNKGGGSSGGSGGSGGISSGLLSGRSDNHGGSDIQMTQSPSSLSASVGDRVTITCRASQSISSYLNWYQQKPGKAPKLLIYAASSLQSGVPSRFSGSGSGTDFTLTISSLQPEDFATYYCQQDNGYPSTFGGGTKVEIKR

SEQ ID NO: 990 - DNA, 474 bp, Artificial Sequence; identical to SEQ ID NO: 980
  chemically synthesized

SEQ ID NO: 991 - protein, 152 aa, Artificial Sequence
  chemically synthesized
IFCHMGVVVPQCANYGGGSSGGSGGSGGISSGLLSGRSDNHGGSDIQMTQSPSSLSASVGDRVTITCRASQSISSYLNWYQQKPGKAPKLLIYAASSLQSGVPSRFSGSGSGTDFTLTISSLQPEDFATYYCQQDNGYPSTFGGGTKVEIKR

SEQ ID NO: 992 - DNA, 474 bp, Artificial Sequence; identical to SEQ ID NO: 980
  chemically synthesized

SEQ ID NO: 993 - protein, 152 aa, Artificial Sequence
  chemically synthesized
PCHPHAYDARPYCNVGGGSSGGSGGSGGISSGLLSGRSDNHGGSDIQMTQSPSSLSASVGDRVTITCRASQSISSYLNWYQQKPGKAPKLLIYAASSLQSGVPSRFSGSGSGTDFTLTISSLQPEDFATYYCQQDNGYPSTFGGGTKVEIKR

SEQ ID NO: 994 - DNA, 477 bp, Artificial Sequence
  chemically synthesized
ggaggtggctcgagcggtggcagcggtgctgtgggtctcctggctcccccgggcggcctgtccggccgcagcgataatcatggcggttctgacatccagatgacccagagccccagcagcctgtctgctagcgtgggcgacagagtgaccatcacctgtagagccagccagagcatcagcagctacctgaactggtatcagcagaagcccggcaaggcccccaaactgctgatctacgccgccagctctctgcagtctggcgtgcccagcagattttccggcagcggctctggcaccgacttcaccctgaccatcagctccctgcagcccgaggacttcgccacctactactgccagcaggacaacggctaccccagcacctttggcggaggtaccaaggtggaaatcaagcgttgtgaggccactcacaagacatcaacttcacccattgtcaagagcttcaacaggaatgagtgt

SEQ ID NO: 995 - protein, 153 aa, Artificial Sequence
  chemically synthesized
LCEVLMLLQHPWCMGGGGSSGGSGAVGLLAPPGGLSGRSDNHGGSDIQMTQSPSSLSASVGDRVTITCRASQSISSYLNWYQQKPGKAPKLLIYAASSLQSGVPSRFSGSGSGTDFTLTISSLQPEDFATYYCQQDNGYPSTFGGGTKVEIKR

SEQ ID NO: 996 - DNA, 477 bp, Artificial Sequence
  chemically synthesized
ggaggtggctcgagcggtggcagcggtgctgtgggtctcctggctcccccgggcggcctgtccggccgcagcgataatcatggcggttctgacatccagatgacccagagccccagcagcctgtctgctagcgtgggcgacagagtgaccatcacctgtagagccagccagagcatcagcagctacctgaactggtatcagcagaagcccggcaaggcccccaaactgctgatctacgccgccagctctctgcagtctggcgtgcccagcagattttccggcagcggctctggcaccgacttcaccctgaccatcagctccctgcagcccgaggacttcgccacctactactgccagcaggacaacggctaccccagcacctttggcggaggtaccaaggtggaaatcaagcgttgcgaagtcacccatcagggcctgagctcgcccgtcacaaagagcttcaacaggggagagtgt

SEQ ID NO: 997 - protein, 153 aa, Artificial Sequence
  chemically synthesized
ILYCDSWGAGCLTRPGGGSSGGSGAVGLLAPPGGLSGRSDNHGGSDIQMTQSPSSLSASVGDRVTITCRASQSISSYLNWYQQKPGKAPKLLIYAASSLQSGVPSRFSGSGSGTDFTLTISSLQPEDFATYYCQQDNGYPSTFGGGTKVEIKR

SEQ ID NO: 998 - DNA, 477 bp, Artificial Sequence; identical to SEQ ID NO: 996
  chemically synthesized

SEQ ID NO: 999 - protein, 153 aa, Artificial Sequence
  chemically synthesized
GIALCPSHFCQLPQTGGGSSGGSGAVGLLAPPGGLSGRSDNHGGSDIQMTQSPSSLSASVGDRVTITCRASQSISSYLNWYQQKPGKAPKLLIYAASSLQSGVPSRFSGSGSGTDFTLTISSLQPEDFATYYCQQDNGYPSTFGGGTKVEIKR

SEQ ID NO: 1000 - DNA, 477 bp, Artificial Sequence; identical to SEQ ID NO: 996
  chemically synthesized

SEQ ID NO: 1001 - protein, 153 aa, Artificial Sequence
  chemically synthesized
YLPCHFVPIGACNNKGGGSSGGSGAVGLLAPPGGLSGRSDNHGGSDIQMTQSPSSLSASVGDRVTITCRASQSISSYLNWYQQKPGKAPKLLIYAASSLQSGVPSRFSGSGSGTDFTLTISSLQPEDFATYYCQQDNGYPSTFGGGTKVEIKR

SEQ ID NO: 1002 - DNA, 477 bp, Artificial Sequence; identical to SEQ ID NO: 994
  chemically synthesized

SEQ ID NO: 1003 - protein, 153 aa, Artificial Sequence
  chemically synthesized
IFCHMGVVVPQCANYGGGSSGGSGAVGLLAPPGGLSGRSDNHGGSDIQMTQSPSSLSASVGDRVTITCRASQSISSYLNWYQQKPGKAPKLLIYAASSLQSGVPSRFSGSGSGTDFTLTISSLQPEDFATYYCQQDNGYPSTFGGGTKVEIKR

SEQ ID NO: 1004 - DNA, 477 bp, Artificial Sequence; identical to SEQ ID NO: 994
  chemically synthesized

SEQ ID NO: 1005 - protein, 153 aa, Artificial Sequence
  chemically synthesized
PCHPHAYDARPYCNVGGGSSGGSGAVGLLAPPGGLSGRSDNHGGSDIQMTQSPSSLSASVGDRVTITCRASQSISSYLNWYQQKPGKAPKLLIYAASSLQSGVPSRFSGSGSGTDFTLTISSLQPEDFATYYCQQDNGYPSTFGGGTKVEIKR

SEQ ID NO: 1006 - DNA, 18 bp, Artificial Sequence
  chemically synthesized
cagggccagtccggctca

SEQ ID NO: 1007 - DNA, 786 bp, Artificial Sequence
  chemically synthesized
tatctgccctgccacttcgtgccaatcggggcctgtaacaataagggcggtggatctagtggtggctcaggcgggtctggcggcatttccagtggactcttgtcaggacgatccgataatcatggcgggtccgacatccagatgacacagagcccttcttccctctccgcaagcgttggcgacagggtcaccattacctgtagggcttctcagagcatctcaagctatctgaactggtaccagcagaaacctggaaaggctccaaaactgctgatttacgctgcctccagtcttcagtcaggcgtcccctccagatttagcggatcaggtagtggaactgattttacccttacaatatcttctctgcagccagaggacttcgccacatactattgtcagcaagacaatggttaccccagtacatttggcggagggacaaaggtcgagatcaaaaggaccgtagcagcaccaagcgtctttattttcccccccagtgacgaacagctgaagagcggaacagcttcagtggtgtgtctcctgaataacttctatccacgcgaggcaaaggtgcagtggaaggtggacaatgcactgcagtctggtaattcccaagaaagtgttactgagcaggattccaaggattcaacttactctctgtctagcaccctgactctttctaaagcagattatgagaagcataaggtctacgcttgcgaggtgacccaccaggggctttcctctccagttaccaagtcattcaaccggggtgagtgttgatgagaattc

SEQ ID NO: 1008 - protein, 258 aa, Artificial Sequence
  chemically synthesized
GIALCPSHFCQLPQTGGGSSGGSGGSGGISSGLLSGRSDNHGGSDIQMTQSPSSLSASVGDRVTITCRASQSISSYLNWYQQKPGKAPKLLIYAASSLQSGVPSRFSGSGSGTDFTLTISSLQPEDFATYYCQQDNGYPSTFGGGTKVEIKRTVAAPSVFIFPPSDEQLKSGTASVVCLLNNFYPREAKVQWKVDNALQSGNSQESVTEQDSKDSTYSLSSTLTLSKADYEKHKVYACEVTHQGLSSPVTKSFNRGEC

SEQ ID NO: 1009 - protein, 19 aa, Artificial Sequence
  chemically synthesized
GLSGRSDNHGGAVGLLAPP

SEQ ID NO: 1010 - protein, 21 aa, Artificial Sequence
  chemically synthesized
GLSGRSDNHGGVHMPLGFLGP

SEQ ID NO: 1011 - protein, 6 aa, Artificial Sequence
  chemically synthesized
QSMSSY

SEQ ID NO: 1012 - protein, 8 aa, Artificial Sequence
  chemically synthesized
GITVGTNY

SEQ ID NO: 1013 - protein, 7 aa, Artificial Sequence
  chemically synthesized
ISSGGNT

SEQ ID NO: 1014 - protein, 13 aa, Artificial Sequence
  chemically synthesized
QASESVYSNNYLS

SEQ ID NO: 1015 - protein, 7 aa, Artificial Sequence
  chemically synthesized
LASTLAS

SEQ ID NO: 1016 - protein, 12 aa, Artificial Sequence
  chemically synthesized
IGGKSSSTDGNA

SEQ ID NO: 1017 - protein, 5 aa, Artificial Sequence
  chemically synthesized
SNGLT

SEQ ID NO: 1018 - protein, 16 aa, Artificial Sequence
  chemically synthesized
TINKDASAYYASWAKG

SEQ ID NO: 1019 - protein, 9 aa, Artificial Sequence
  chemically synthesized
IAFKTGTSI

SEQ ID NO: 1020 - protein, 16 aa, Artificial Sequence
  chemically synthesized
RSSKSLLHSNGITYLY

SEQ ID NO: 1021 - protein, 7 aa, Artificial Sequence
  chemically synthesized
QMSNLAS

SEQ ID NO: 1022 - protein, 9 aa, Artificial Sequence
  chemically synthesized
AQNLEPPLT

SEQ ID NO: 1023 - protein, 5 aa, Artificial Sequence
  chemically synthesized
DYYTH

SEQ ID NO: 1024 - protein, 17 aa, Artificial Sequence
  chemically synthesized
WIDPENGKTAYAPKFQG

SEQ ID NO: 1025 - protein, 10 aa, Artificial Sequence
  chemically synthesized
GGYDVYFLDY

SEQ ID NO: 1026 - protein, 11 aa, Artificial Sequence
  chemically synthesized
KASQDVGIVVA

SEQ ID NO: 1027 - protein, 7 aa, Artificial Sequence
  chemically synthesized
WASIRHT

SEQ ID NO: 1028 - protein, 10 aa, Artificial Sequence
  chemically synthesized
QQYSNYPLYT

SEQ ID NO: 1029 - protein, 10 aa, Artificial Sequence
  chemically synthesized
GFSLTSYGVH

SEQ ID NO: 1030 - protein, 16 aa, Artificial Sequence
  chemically synthesized
VIWAGGSTNYNSALMS

SEQ ID NO: 1031 - protein, 11 aa, Artificial Sequence
  chemically synthesized
AKPYGNSAMDY

SEQ ID NO: 1032 - protein, 16 aa, Artificial Sequence
  chemically synthesized
VIWAGGSTNYVDSVKG

SEQ ID NO: 1033 - protein, 11 aa, Artificial Sequence
  chemically synthesized
AKPYGTSAMDY

SEQ ID NO: 1034 - protein, 16 aa, Artificial Sequence
  chemically synthesized
VIWAGGSTNYADSVKG

SEQ ID NO: 1035 - protein, 14 aa, Artificial Sequence
  chemically synthesized
ASQSVSTSSSSFMH

SEQ ID NO: 1036 - protein, 7 aa, Artificial Sequence
  chemically synthesized
YASNLES

SEQ ID NO: 1037 - protein, 9 aa, Artificial Sequence
  chemically synthesized
QHSWEIPYT

SEQ ID NO: 1038 - protein, 5 aa, Artificial Sequence
  chemically synthesized
SYGMS

SEQ ID NO: 1039 - protein, 16 aa, Artificial Sequence
  chemically synthesized
SISSGGSTYYPDSVKG

SEQ ID NO: 1040 - protein, 8 aa, Artificial Sequence
  chemically synthesized
GYDSGFAY

SEQ ID NO: 1041 - protein, 15 aa, Artificial Sequence
  chemically synthesized
RASQSVSTSSSSYMH

SEQ ID NO: 1042 - protein, 16 aa, Artificial Sequence
  chemically synthesized
SISSGGTTYYPDSVKG

SEQ ID NO: 1043 - protein, 11 aa, Artificial Sequence
  chemically synthesized
KASQSVSNDVA

SEQ ID NO: 1044 - protein, 7 aa, Artificial Sequence
  chemically synthesized
YAANRYT

SEQ ID NO: 1045 - protein, 9 aa, Artificial Sequence
  chemically synthesized
QQDYTSPYT

SEQ ID NO: 1046 - protein, 5 aa, Artificial Sequence
  chemically synthesized
TYGVH

SEQ ID NO: 1047 - protein, 17 aa, Artificial Sequence
  chemically synthesized
VIWRGVTTDYNAAFMAS

SEQ ID NO: 1048 - protein, 8 aa, Artificial Sequence
  chemically synthesized
LGFYAMDY

SEQ ID NO: 1049 - protein, 11 aa, Artificial Sequence
  chemically synthesized
KASQSVSNDVG

SEQ ID NO: 1050 - protein, 7 aa, Artificial Sequence
  chemically synthesized
YASNRYS

SEQ ID NO: 1051 - protein, 5 aa, Artificial Sequence
  chemically synthesized
SYGVH

SEQ ID NO: 1052 - protein, 16 aa, Artificial Sequence
  chemically synthesized
VIWSGGVTDYNAAFIS

SEQ ID NO: 1053 - protein, 16 aa, Artificial Sequence
  chemically synthesized
RSSQIIVHSNANTYLE

SEQ ID NO: 1054 - protein, 7 aa, Artificial Sequence
  chemically synthesized
KVSNRFS

SEQ ID NO: 1055 - protein, 9 aa, Artificial Sequence
  chemically synthesized
FQGSHVPYT

SEQ ID NO: 1056 - protein, 5 aa, Artificial Sequence
  chemically synthesized
TYWMH

SEQ ID NO: 1057 - protein, 17 aa, Artificial Sequence
  chemically synthesized
QINPDSTTINTAPSLKD

SEQ ID NO: 1058 - protein, 10 aa, Artificial Sequence
  chemically synthesized
PGDYGYDFDC

SEQ ID NO: 1059 - protein, 12 aa, Artificial Sequence
  chemically synthesized
SASSSVSSSYLY

SEQ ID NO: 1060 - protein, 7 aa, Artificial Sequence
  chemically synthesized
NTSNLAS

SEQ ID NO: 1061 - protein, 9 aa, Artificial Sequence
  chemically synthesized
HQWRSYPPT

SEQ ID NO: 1062 - protein, 5 aa, Artificial Sequence
  chemically synthesized
SGYWN

SEQ ID NO: 1063 - protein, 16 aa, Artificial Sequence
  chemically synthesized
YISYSGSTYYNPSLKS

SEQ ID NO: 1064 - protein, 11 aa, Artificial Sequence
  chemically synthesized
SLLWFSTGFAY

SEQ ID NO: 1065 - protein, 10 aa, Artificial Sequence
  chemically synthesized
SANSSVSYMH

SEQ ID NO: 1066 - protein, 7 aa, Artificial Sequence
  chemically synthesized
DTSKLAS

SEQ ID NO: 1067 - protein, 9 aa, Artificial Sequence
  chemically synthesized
QQWSSNPWT

SEQ ID NO: 1068 - protein, 16 aa, Artificial Sequence
  chemically synthesized
YIWSGGITDYNAAFKS

SEQ ID NO: 1069 - protein, 15 aa, Artificial Sequence
  chemically synthesized
RASQSVSTSSYSYMH

SEQ ID NO: 1070 - protein, 9 aa, Artificial Sequence
  chemically synthesized
QNSWEIPYT

SEQ ID NO: 1071 - protein, 5 aa, Artificial Sequence
  chemically synthesized
STGMS

SEQ ID NO: 1072 - protein, 16 aa, Artificial Sequence
  chemically synthesized
SISSGGTTYYLGSVQG

SEQ ID NO: 1073 - protein, 8 aa, Artificial Sequence
  chemically synthesized
GYDAGFAY

SEQ ID NO: 1074 - protein, 17 aa, Artificial Sequence
  chemically synthesized
KSSQSLLYSSNQKNSLA

SEQ ID NO: 1075 - protein, 7 aa, Artificial Sequence
  chemically synthesized
WASNRES

SEQ ID NO: 1076 - protein, 9 aa, Artificial Sequence
  chemically synthesized
QQYYSYPLT

SEQ ID NO: 1077 - protein, 5 aa, Artificial Sequence
  chemically synthesized
SGYWT

SEQ ID NO: 1078 - protein, 15 aa, Artificial Sequence
  chemically synthesized
YIYTGSTYYNPSLKS

SEQ ID NO: 1079 - protein, 9 aa, Artificial Sequence
  chemically synthesized
QRDWLGFAY

SEQ ID NO: 1080 - protein, 15 aa, Artificial Sequence
  chemically synthesized
RASQSVSTSSYSYVH

SEQ ID NO: 1081 - protein, 16 aa, Artificial Sequence
  chemically synthesized
SISSGGSIYYPDSVKG

SEQ ID NO: 1082 - protein, 8 aa, Artificial Sequence
  chemically synthesized
GYDAGFAF

SEQ ID NO: 1083 - protein, 10 aa, Artificial Sequence
  chemically synthesized
GFTFSMYMMM

SEQ ID NO: 1084 - protein, 10 aa, Artificial Sequence
  chemically synthesized
GFTFSAYAMA

SEQ ID NO: 1085 - protein, 10 aa, Artificial Sequence
  chemically synthesized
GFTFSAYRMF

SEQ ID NO: 1086 - protein, 10 aa, Artificial Sequence
  chemically synthesized
GFTFSAYLMV

SEQ ID NO: 1087 - protein, 10 aa, Artificial Sequence
  chemically synthesized
GFTFSAYVMF

SEQ ID NO: 1088 - protein, 10 aa, Artificial Sequence
  chemically synthesized
GFTFSAYVMS

SEQ ID NO: 1089 - protein, 10 aa, Artificial Sequence
  chemically synthesized
GFTFSGYLMV

SEQ ID NO: 1090 - protein, 10 aa, Artificial Sequence
  chemically synthesized
GFTFSGYQML

SEQ ID NO: 1091 - protein, 10 aa, Artificial Sequence
  chemically synthesized
GFTFSGYSMF

SEQ ID NO: 1092 - protein, 10 aa, Artificial Sequence
  chemically synthesized
GFTFSGYWMA

SEQ ID NO: 1093 - protein, 10 aa, Artificial Sequence
  chemically synthesized
GFTFSQYLMY

SEQ ID NO: 1094 - protein, 10 aa, Artificial Sequence
  chemically synthesized
GFTFSQYVMF

SEQ ID NO: 1095 - protein, 10 aa, Artificial Sequence
  chemically synthesized
GFTFSQYYMY

SEQ ID NO: 1096 - protein, 10 aa, Artificial Sequence
  chemically synthesized
GFTFSSYLMS

SEQ ID NO: 1097 - protein, 10 aa, Artificial Sequence
  chemically synthesized
GFTFSSYLMT

SEQ ID NO: 1098 - protein, 10 aa, Artificial Sequence
  chemically synthesized
GFTFSSYQMV

SEQ ID NO: 1099 - protein, 10 aa, Artificial Sequence
  chemically synthesized
GFTFSSYSMA

SEQ ID NO: 1100 - protein, 10 aa, Artificial Sequence
  chemically synthesized
GFTFSSYVMF

SEQ ID NO: 1101 - protein, 10 aa, Artificial Sequence
  chemically synthesized
GFTFSSYVMS

SEQ ID NO: 1102 - protein, 10 aa, Artificial Sequence
  chemically synthesized
GFTFSSYVMY

SEQ ID NO: 1103 - protein, 10 aa, Artificial Sequence
  chemically synthesized
GFTFSSYYMF

SEQ ID NO: 1104 - protein, 10 aa, Artificial Sequence
  chemically synthesized
GFTFSSYYMV

SEQ ID NO: 1105 - protein, 10 aa, Artificial Sequence
  chemically synthesized
GFTFSYYSMV

SEQ ID NO: 1106 - protein, 10 aa, Artificial Sequence
  chemically synthesized
GFTFSWYLMA

SEQ ID NO: 1107 - protein, 10 aa, Artificial Sequence
  chemically synthesized
GFTFSWYQMS

SEQ ID NO: 1108 - protein, 115 aa, Artificial Sequence
  chemically synthesized
QSLEESGGRLVKPDETLTITCTVSGIDLSSNGLTWVRQAPGEGLEWIGTINKDASAYYASWAKGRLTISKPSSTKVDLKITSPTTEDTATYFCGRIAFKTGTSIWGPGTLVTVSS

SEQ ID NO: 1109 - protein, 112 aa, Artificial Sequence
  chemically synthesized
AIVMTQTPSPVSAAVGGTVTINCQASESVYSNNYLSWFQQKPGQPPKLLIYLASTLASGVPSRFKGSGSGTQFTLTISGVQCDDAATYYCIGGKSSSTDGNAFGGGTEVVVR

SEQ ID NO: 1110 - protein, 121 aa, Artificial Sequence
  chemically synthesized
QMQLVQSGAEVKKPGSSVKVSCKASGGTFSSYAISWVRQAPGQGLEWMGGIIPIFGTANYAQKFQGRVTITADESTSTAYMELSSLRSEDTAVYYCARGNIVATITPLDYWGQGTLVTVSS

SEQ ID NO: 1111 - protein, 110 aa, Artificial Sequence
  chemically synthesized
QPVLTQPPSVSAAPGQKVTISCSGSSSNIANNYVSWYQQLPGTAPKLLIFANNKRPSGIPDRFSGSKSGTSAALDITGLQTGDEADYYCGTWDSDLRAGVFGGGTKLTVL

SEQ ID NO: 1112 - protein, 123 aa, Artificial Sequence; identical to SEQ ID NO: 531
  chemically synthesized

SEQ ID NO: 1113 - protein, 118 aa, Artificial Sequence; identical to SEQ ID NO: 540
  chemically synthesized

SEQ ID NO: 1114 - protein, 118 aa, Artificial Sequence; identical to SEQ ID NO: 541
  chemically synthesized

SEQ ID NO: 1115 - protein, 118 aa, Artificial Sequence; identical to SEQ ID NO: 540
  chemically synthesized

SEQ ID NO: 1116 - protein, 118 aa, Artificial Sequence; identical to SEQ ID NO: 541
  chemically synthesized

SEQ ID NO: 1117 - protein, 118 aa, Artificial Sequence; identical to SEQ ID NO: 541
  chemically synthesized

SEQ ID NO: 1118 - protein, 118 aa, Artificial Sequence; identical to SEQ ID NO: 540
  chemically synthesized

SEQ ID NO: 1119 - protein, 120 aa, Artificial Sequence; identical to SEQ ID NO: 539
  chemically synthesized

SEQ ID NO: 1120 - protein, 118 aa, Artificial Sequence; identical to SEQ ID NO: 549
  chemically synthesized

SEQ ID NO: 1121 - protein, 118 aa, Artificial Sequence; identical to SEQ ID NO: 550
  chemically synthesized

SEQ ID NO: 1122 - protein, 121 aa, Artificial Sequence
  chemically synthesized
QMQLVQSGAEVKKPGSSVKVSCKASGGTFSSYAYSWVRQAPGQGLEWMGGIIPSFGTANYAQKFQGRVTITADESTSTAYMELSSLRSEDTAVYYCARGPIVATITPLDYWGQGTLVTVSS

SEQ ID NO: 1123 - protein, 121 aa, Artificial Sequence
  chemically synthesized
QMQLVQSGAEVKKPGSSVKVSCKASGGTFSSYAYSWVRQAPGQGLEWMGGIIPIFGTANYAQKFQGRVTITADESTSTAYMELSSLRSEDTAVYYCARGPIVATITPLDYWGQGTLVTVSS

SEQ ID NO: 1124 - protein, 121 aa, Artificial Sequence; identical to SEQ ID NO: 1122
  chemically synthesized

SEQ ID NO: 1125 - protein, 121 aa, Artificial Sequence
  chemically synthesized
QMQLVQSGAEVKKPGSSVKVSCKASGGTFSSYAISWVRQAPGQGLEWMGGIIPAFGTANYAQKFQGRVTITADESTSTAYMELSSLRSEDTAVYYCARGPIVATITPLDYWGQGTLVTVSS

SEQ ID NO: 1126 - protein, 108 aa, Artificial Sequence; identical to SEQ ID NO: 577
  chemically synthesized

SEQ ID NO: 1127 - protein, 107 aa, Artificial Sequence
  chemically synthesized
AIRMTQSPSSLSASVGDRVTITCRASQSISSYLNWYQQKPGKAPKLLIYTTSSLKSGVPSRFSGSGSGTDFTLTISRLQPEDFATYYCQQSYSSTWTFGRGTKVEIK

SEQ ID NO: 1128 - protein, 110 aa, Artificial Sequence; identical to SEQ ID NO: 551
  chemically synthesized

SEQ ID NO: 1129 - protein, 110 aa, Artificial Sequence; identical to SEQ ID NO: 560
  chemically synthesized

SEQ ID NO: 1130 - protein, 111 aa, Artificial Sequence; identical to SEQ ID NO: 561
  chemically synthesized

SEQ ID NO: 1131 - protein, 110 aa, Artificial Sequence; identical to SEQ ID NO: 562
  chemically synthesized

SEQ ID NO: 1132 - protein, 110 aa, Artificial Sequence; identical to SEQ ID NO: 563
  chemically synthesized

SEQ ID NO: 1133 - protein, 110 aa, Artificial Sequence; identical to SEQ ID NO: 564
  chemically synthesized

SEQ ID NO: 1134 - protein, 112 aa, Artificial Sequence; identical to SEQ ID NO: 565
  chemically synthesized

SEQ ID NO: 1135 - protein, 110 aa, Artificial Sequence; identical to SEQ ID NO: 572
  chemically synthesized

SEQ ID NO: 1136 - protein, 110 aa, Artificial Sequence; identical to SEQ ID NO: 574
  chemically synthesized

SEQ ID NO: 1137 - protein, 112 aa, Artificial Sequence; identical to SEQ ID NO: 575
  chemically synthesized

SEQ ID NO: 1138 - protein, 108 aa, Artificial Sequence; identical to SEQ ID NO: 576
  chemically synthesized

SEQ ID NO: 1139 - protein, 108 aa, Artificial Sequence; identical to SEQ ID NO: 577
  chemically synthesized

SEQ ID NO: 1140 - protein, 108 aa, Artificial Sequence; identical to SEQ ID NO: 577
  chemically synthesized

SEQ ID NO: 1141 - protein, 108 aa, Artificial Sequence; identical to SEQ ID NO: 577
  chemically synthesized

SEQ ID NO: 1142 - protein, 122 aa, Artificial Sequence
  chemically synthesized
QVQLVQSGSEVKKSGSSVKVSCKTSGGTFSITNYAINWVRQAPGQGLEWMGGILPIFGAAKYAQKFQDRVTITADESTNTAYLELSSLTSEDTAMYYCARGKRWLQSDLQYWGQGTLVTVSS

SEQ ID NO: 1143 - protein, 110 aa, Artificial Sequence
  chemically synthesized
QPVLTQPASVSGSPGQSITISCTGSSSDVGSYDLVSWYQQSPGKVPKLLIYEGVKRPSGVSNRFSGSKSGNTASLTISGLQAEDEADYYCSSYAGTRNFVFGGGTQLTVL

SEQ ID NO: 1144 - protein, 153 aa, Artificial Sequence
  chemically synthesized
QGQSGSGIALCPSHFCQLPQTGGGSSGGSGGSGGLSGRSDNHGGSDIQMTQSPSSLSASVGDRVTITCRASQSISSYLNWYQQKPGKAPKLLIYAASSLQSGVPSRFSGSGSGTDFTLTISSLQPEDFATYYCQQDNGYPSTFGGGTKVEIKR

SEQ ID NO: 1145 - protein, 147 aa, Artificial Sequence
  chemically synthesized
GIALCPSHFCQLPQTGGGSSGGSGGSGGLSGRSDNHGGSDIQMTQSPSSLSASVGDRVTITCRASQSISSYLNWYQQKPGKAPKLLIYAASSLQSGVPSRFSGSGSGTDFTLTISSLQPEDFATYYCQQDNGYPSTFGGGTKVEIKR

SEQ ID NO: 1146 - protein, 153 aa, Artificial Sequence
  chemically synthesized
QGQSGSGIALCPSHFCQLPQTGGGSSGGSGGSGGLSGRSGNHGGSDIQMTQSPSSLSASVGDRVTITCRASQSISSYLNWYQQKPGKAPKLLIYAASSLQSGVPSRFSGSGSGTDFTLTISSLQPEDFATYYCQQDNGYPSTFGGGTKVEIKR

SEQ ID NO: 1147 - protein, 147 aa, Artificial Sequence
  chemically synthesized
GIALCPSHFCQLPQTGGGSSGGSGGSGGLSGRSGNHGGSDIQMTQSPSSLSASVGDRVTITCRASQSISSYLNWYQQKPGKAPKLLIYAASSLQSGVPSRFSGSGSGTDFTLTISSLQPEDFATYYCQQDNGYPSTFGGGTKVEIKR

SEQ ID NO: 1148 - protein, 153 aa, Artificial Sequence
  chemically synthesized
QGQSGSGIALCPSHFCQLPQTGGGSSGGSGGSGGISSGLLSSGGSDIQMTQSPSSLSASVGDRVTITCRASQSISSYLNWYQQKPGKAPKLLIYAASSLQSGVPSRFSGSGSGTDFTLTISSLQPEDFATYYCQQDNGYPSTFGGGTKVEIKR

SEQ ID NO: 1149 - protein, 147 aa, Artificial Sequence
  chemically synthesized
GIALCPSHFCQLPQTGGGSSGGSGGSGGISSGLLSSGGSDIQMTQSPSSLSASVGDRVTITCRASQSISSYLNWYQQKPGKAPKLLIYAASSLQSGVPSRFSGSGSGTDFTLTISSLQPEDFATYYCQQDNGYPSTFGGGTKVEIKR

SEQ ID NO: 1150 - protein, 153 aa, Artificial Sequence
  chemically synthesized
QGQSGSGIALCPSHFCQLPQTGGGSSGGSGGSGGQNQALRMAGGSDIQMTQSPSSLSASVGDRVTITCRASQSISSYLNWYQQKPGKAPKLLIYAASSLQSGVPSRFSGSGSGTDFTLTISSLQPEDFATYYCQQDNGYPSTFGGGTKVEIKR

SEQ ID NO: 1151 - protein, 147 aa, Artificial Sequence
  chemically synthesized
GIALCPSHFCQLPQTGGGSSGGSGGSGGQNQALRMAGGSDIQMTQSPSSLSASVGDRVTITCRASQSISSYLNWYQQKPGKAPKLLIYAASSLQSGVPSRFSGSGSGTDFTLTISSLQPEDFATYYCQQDNGYPSTFGGGTKVEIKR

SEQ ID NO: 1152 - protein, 155 aa, Artificial Sequence
  chemically synthesized
QGQSGSGIALCPSHFCQLPQTGGGSSGGSGGSGGVHMPLGFLGPGGSDIQMTQSPSSLSASVGDRVTITCRASQSISSYLNWYQQKPGKAPKLLIYAASSLQSGVPSRFSGSGSGTDFTLTISSLQPEDFATYYCQQDNGYPSTFGGGTKVEIKR

SEQ ID NO: 1153 - protein, 149 aa, Artificial Sequence
  chemically synthesized
GIALCPSHFCQLPQTGGGSSGGSGGSGGVHMPLGFLGPGGSDIQMTQSPSSLSASVGDRVTITCRASQSISSYLNWYQQKPGKAPKLLIYAASSLQSGVPSRFSGSGSGTDFTLTISSLQPEDFATYYCQQDNGYPSTFGGGTKVEIKR

SEQ ID NO: 1154 - protein, 158 aa, Artificial Sequence
  chemically synthesized
QGQSGSGIALCPSHFCQLPQTGGGSSGGSGGSGGISSGLLSGRSGNHGGSDIQMTQSPSSLSASVGDRVTITCRASQSISSYLNWYQQKPGKAPKLLIYAASSLQSGVPSRFSGSGSGTDFTLTISSLQPEDFATYYCQQDNGYPSTFGGGTKVEIKR

SEQ ID NO: 1155 - protein, 152 aa, Artificial Sequence
  chemically synthesized
GIALCPSHFCQLPQTGGGSSGGSGGSGGISSGLLSGRSGNHGGSDIQMTQSPSSLSASVGDRVTITCRASQSISSYLNWYQQKPGKAPKLLIYAASSLQSGVPSRFSGSGSGTDFTLTISSLQPEDFATYYCQQDNGYPSTFGGGTKVEIKR

SEQ ID NO: 1156 - protein, 160 aa, Artificial Sequence
  chemically synthesized
QGQSGSGIALCPSHFCQLPQTGGGSSGGSGGSGGISSGLLSGRSANPRGGGSDIQMTQSPSSLSASVGDRVTITCRASQSISSYLNWYQQKPGKAPKLLIYAASSLQSGVPSRFSGSGSGTDFTLTISSLQPEDFATYYCQQDNGYPSTFGGGTKVEIKR

SEQ ID NO: 1157 - protein, 154 aa, Artificial Sequence
  chemically synthesized
GIALCPSHFCQLPQTGGGSSGGSGGSGGISSGLLSGRSANPRGGGSDIQMTQSPSSLSASVGDRVTITCRASQSISSYLNWYQQKPGKAPKLLIYAASSLQSGVPSRFSGSGSGTDFTLTISSLQPEDFATYYCQQDNGYPSTFGGGTKVEIKR

SEQ ID NO: 1158 - protein, 163 aa, Artificial Sequence
  chemically synthesized
QGQSGSGIALCPSHFCQLPQTGGGSSGGSGGSGGAVGLLAPPTSGRSANPRGGGSDIQMTQSPSSLSASVGDRVTITCRASQSISSYLNWYQQKPGKAPKLLIYAASSLQSGVPSRFSGSGSGTDFTLTISSLQPEDFATYYCQQDNGYPSTFGGGTKVEIKR

SEQ ID NO: 1159 - protein, 157 aa, Artificial Sequence
  chemically synthesized
GIALCPSHFCQLPQTGGGSSGGSGGSGGAVGLLAPPTSGRSANPRGGGSDIQMTQSPSSLSASVGDRVTITCRASQSISSYLNWYQQKPGKAPKLLIYAASSLQSGVPSRFSGSGSGTDFTLTISSLQPEDFATYYCQQDNGYPSTFGGGTKVEIKR

SEQ ID NO: 1160 - protein, 162 aa, Artificial Sequence
  chemically synthesized
QGQSGSGIALCPSHFCQLPQTGGGSSGGSGGSGGAVGLLAPPSGRSANPRGGGSDIQMTQSPSSLSASVGDRVTITCRASQSISSYLNWYQQKPGKAPKLLIYAASSLQSGVPSRFSGSGSGTDFTLTISSLQPEDFATYYCQQDNGYPSTFGGGTKVEIKR

SEQ ID NO: 1161 - protein, 156 aa, Artificial Sequence
  chemically synthesized
GIALCPSHFCQLPQTGGGSSGGSGGSGGAVGLLAPPSGRSANPRGGGSDIQMTQSPSSLSASVGDRVTITCRASQSISSYLNWYQQKPGKAPKLLIYAASSLQSGVPSRFSGSGSGTDFTLTISSLQPEDFATYYCQQDNGYPSTFGGGTKVEIKR

SEQ ID NO: 1162 - protein, 158 aa, Artificial Sequence
  chemically synthesized
QGQSGSGIALCPSHFCQLPQTGGGSSGGSGGSGGISSGLLSGRSDDHGGSDIQMTQSPSSLSASVGDRVTITCRASQSISSYLNWYQQKPGKAPKLLIYAASSLQSGVPSRFSGSGSGTDFTLTISSLQPEDFATYYCQQDNGYPSTFGGGTKVEIKR

SEQ ID NO: 1163 - protein, 152 aa, Artificial Sequence
  chemically synthesized
GIALCPSHFCQLPQTGGGSSGGSGGSGGISSGLLSGRSDDHGGSDIQMTQSPSSLSASVGDRVTITCRASQSISSYLNWYQQKPGKAPKLLIYAASSLQSGVPSRFSGSGSGTDFTLTISSLQPEDFATYYCQQDNGYPSTFGGGTKVEIKR

SEQ ID NO: 1164 - protein, 158 aa, Artificial Sequence
  chemically synthesized
QGQSGSGIALCPSHFCQLPQTGGGSSGGSGGSGGISSGLLSGRSDIHGGSDIQMTQSPSSLSASVGDRVTITCRASQSISSYLNWYQQKPGKAPKLLIYAASSLQSGVPSRFSGSGSGTDFTLTISSLQPEDFATYYCQQDNGYPSTFGGGTKVEIKR

SEQ ID NO: 1165 - protein, 152 aa, Artificial Sequence
  chemically synthesized
GIALCPSHFCQLPQTGGGSSGGSGGSGGISSGLLSGRSDIHGGSDIQMTQSPSSLSASVGDRVTITCRASQSISSYLNWYQQKPGKAPKLLIYAASSLQSGVPSRFSGSGSGTDFTLTISSLQPEDFATYYCQQDNGYPSTFGGGTKVEIKR

SEQ ID NO: 1166 - protein, 158 aa, Artificial Sequence
  chemically synthesized
QGQSGSGIALCPSHFCQLPQTGGGSSGGSGGSGGISSGLLSGRSDQHGGSDIQMTQSPSSLSASVGDRVTITCRASQSISSYLNWYQQKPGKAPKLLIYAASSLQSGVPSRFSGSGSGTDFTLTISSLQPEDFATYYCQQDNGYPSTFGGGTKVEIKR

SEQ ID NO: 1167 - protein, 152 aa, Artificial Sequence
  chemically synthesized
GIALCPSHFCQLPQTGGGSSGGSGGSGGISSGLLSGRSDQHGGSDIQMTQSPSSLSASVGDRVTITCRASQSISSYLNWYQQKPGKAPKLLIYAASSLQSGVPSRFSGSGSGTDFTLTISSLQPEDFATYYCQQDNGYPSTFGGGTKVEIKR

SEQ ID NO: 1168 - protein, 158 aa, Artificial Sequence
  chemically synthesized
QGQSGSGIALCPSHFCQLPQTGGGSSGGSGGSGGISSGLLSGRSDTHGGSDIQMTQSPSSLSASVGDRVTITCRASQSISSYLNWYQQKPGKAPKLLIYAASSLQSGVPSRFSGSGSGTDFTLTISSLQPEDFATYYCQQDNGYPSTFGGGTKVEIKR

SEQ ID NO: 1169 - protein, 152 aa, Artificial Sequence
  chemically synthesized
GIALCPSHFCQLPQTGGGSSGGSGGSGGISSGLLSGRSDTHGGSDIQMTQSPSSLSASVGDRVTITCRASQSISSYLNWYQQKPGKAPKLLIYAASSLQSGVPSRFSGSGSGTDFTLTISSLQPEDFATYYCQQDNGYPSTFGGGTKVEIKR

SEQ ID NO: 1170 - protein, 158 aa, Artificial Sequence
  chemically synthesized
QGQSGSGIALCPSHFCQLPQTGGGSSGGSGGSGGISSGLLSGRSDYHGGSDIQMTQSPSSLSASVGDRVTITCRASQSISSYLNWYQQKPGKAPKLLIYAASSLQSGVPSRFSGSGSGTDFTLTISSLQPEDFATYYCQQDNGYPSTFGGGTKVEIKR

SEQ ID NO: 1171 - protein, 152 aa, Artificial Sequence
  chemically synthesized
GIALCPSHFCQLPQTGGGSSGGSGGSGGISSGLLSGRSDYHGGSDIQMTQSPSSLSASVGDRVTITCRASQSISSYLNWYQQKPGKAPKLLIYAASSLQSGVPSRFSGSGSGTDFTLTISSLQPEDFATYYCQQDNGYPSTFGGGTKVEIKR

SEQ ID NO: 1172 - protein, 158 aa, Artificial Sequence
  chemically synthesized
QGQSGSGIALCPSHFCQLPQTGGGSSGGSGGSGGISSGLLSGRSDNPGGSDIQMTQSPSSLSASVGDRVTITCRASQSISSYLNWYQQKPGKAPKLLIYAASSLQSGVPSRFSGSGSGTDFTLTISSLQPEDFATYYCQQDNGYPSTFGGGTKVEIKR

SEQ ID NO: 1173 - protein, 152 aa, Artificial Sequence
  chemically synthesized
GIALCPSHFCQLPQTGGGSSGGSGGSGGISSGLLSGRSDNPGGSDIQMTQSPSSLSASVGDRVTITCRASQSISSYLNWYQQKPGKAPKLLIYAASSLQSGVPSRFSGSGSGTDFTLTISSLQPEDFATYYCQQDNGYPSTFGGGTKVEIKR

SEQ ID NO: 1174 - protein, 158 aa, Artificial Sequence
  chemically synthesized
QGQSGSGIALCPSHFCQLPQTGGGSSGGSGGSGGISSGLLSGRSANPGGSDIQMTQSPSSLSASVGDRVTITCRASQSISSYLNWYQQKPGKAPKLLIYAASSLQSGVPSRFSGSGSGTDFTLTISSLQPEDFATYYCQQDNGYPSTFGGGTKVEIKR

SEQ ID NO: 1175 - protein, 152 aa, Artificial Sequence
  chemically synthesized
GIALCPSHFCQLPQTGGGSSGGSGGSGGISSGLLSGRSANPGGSDIQMTQSPSSLSASVGDRVTITCRASQSISSYLNWYQQKPGKAPKLLIYAASSLQSGVPSRFSGSGSGTDFTLTISSLQPEDFATYYCQQDNGYPSTFGGGTKVEIKR

SEQ ID NO: 1176 - protein, 158 aa, Artificial Sequence
  chemically synthesized
QGQSGSGIALCPSHFCQLPQTGGGSSGGSGGSGGISSGLLSGRSANIGGSDIQMTQSPSSLSASVGDRVTITCRASQSISSYLNWYQQKPGKAPKLLIYAASSLQSGVPSRFSGSGSGTDFTLTISSLQPEDFATYYCQQDNGYPSTFGGGTKVEIKR

SEQ ID NO: 1177 - protein, 152 aa, Artificial Sequence
  chemically synthesized
GIALCPSHFCQLPQTGGGSSGGSGGSGGISSGLLSGRSANIGGSDIQMTQSPSSLSASVGDRVTITCRASQSISSYLNWYQQKPGKAPKLLIYAASSLQSGVPSRFSGSGSGTDFTLTISSLQPEDFATYYCQQDNGYPSTFGGGTKVEIKR

SEQ ID NO: 1178 - protein, 158 aa, Artificial Sequence
  chemically synthesized
QGQSGSGIALCPSHFCQLPQTGGGSSGGSGGSGGISSGLLSGRSDNIGGSDIQMTQSPSSLSASVGDRVTITCRASQSISSYLNWYQQKPGKAPKLLIYAASSLQSGVPSRFSGSGSGTDFTLTISSLQPEDFATYYCQQDNGYPSTFGGGTKVEIKR

SEQ ID NO: 1179 - protein, 152 aa, Artificial Sequence
  chemically synthesized
GIALCPSHFCQLPQTGGGSSGGSGGSGGISSGLLSGRSDNIGGSDIQMTQSPSSLSASVGDRVTITCRASQSISSYLNWYQQKPGKAPKLLIYAASSLQSGVPSRFSGSGSGTDFTLTISSLQPEDFATYYCQQDNGYPSTFGGGTKVEIKR

SEQ ID NO: 1180 - protein, 167 aa, Artificial Sequence
  chemically synthesized
QGQSGSGIALCPSHFCQLPQTGGGSSGGSGGSGGAVGLLAPPGGTSTSGRSANPRGGGSDIQMTQSPSSLSASVGDRVTITCRASQSISSYLNWYQQKPGKAPKLLIYAASSLQSGVPSRFSGSGSGTDFTLTISSLQPEDFATYYCQQDNGYPSTFGGGTKVEIKR

SEQ ID NO: 1181 - protein, 161 aa, Artificial Sequence
  chemically synthesized
GIALCPSHFCQLPQTGGGSSGGSGGSGGAVGLLAPPGGTSTSGRSANPRGGGSDIQMTQSPSSLSASVGDRVTITCRASQSISSYLNWYQQKPGKAPKLLIYAASSLQSGVPSRFSGSGSGTDFTLTISSLQPEDFATYYCQQDNGYPSTFGGGTKVEIKR

SEQ ID NO: 1182 - protein, 158 aa, Artificial Sequence
  chemically synthesized
QGQSGSIACRHFMEQLPFCHHGGGSSGGSGGSGGISSGLLSGRSDNHGGSDIQMTQSPSSLSASVGDRVTITCRASQSISSYLNWYQQKPGKAPKLLIYAASSLQSGVPSRFSGSGSGTDFTLTISSLQPEDFATYYCQQDNGYPSTFGGGTKVEIKR

SEQ ID NO: 1183 - protein, 152 aa, Artificial Sequence
  chemically synthesized
IACRHFMEQLPFCHHGGGSSGGSGGSGGISSGLLSGRSDNHGGSDIQMTQSPSSLSASVGDRVTITCRASQSISSYLNWYQQKPGKAPKLLIYAASSLQSGVPSRFSGSGSGTDFTLTISSLQPEDFATYYCQQDNGYPSTFGGGTKVEIKR

SEQ ID NO: 1184 - protein, 158 aa, Artificial Sequence
  chemically synthesized
QGQSGSPCYWHPFFAYRYCNTGGGSSGGSGGSGGISSGLLSGRSDNHGGSDIQMTQSPSSLSASVGDRVTITCRASQSISSYLNWYQQKPGKAPKLLIYAASSLQSGVPSRFSGSGSGTDFTLTISSLQPEDFATYYCQQDNGYPSTFGGGTKVEIKR

SEQ ID NO: 1185 - protein, 152 aa, Artificial Sequence
  chemically synthesized
PCYWHPFFAYRYCNTGGGSSGGSGGSGGISSGLLSGRSDNHGGSDIQMTQSPSSLSASVGDRVTITCRASQSISSYLNWYQQKPGKAPKLLIYAASSLQSGVPSRFSGSGSGTDFTLTISSLQPEDFATYYCQQDNGYPSTFGGGTKVEIKR

SEQ ID NO: 1186 - protein, 158 aa, Artificial Sequence
  chemically synthesized
QGQSGSVCYYMDWLGRNWCSSGGGSSGGSGGSGGISSGLLSGRSDNHGGSDIQMTQSPSSLSASVGDRVTITCRASQSISSYLNWYQQKPGKAPKLLIYAASSLQSGVPSRFSGSGSGTDFTLTISSLQPEDFATYYCQQDNGYPSTFGGGTKVEIKR

SEQ ID NO: 1187 - protein, 152 aa, Artificial Sequence
  chemically synthesized
VCYYMDWLGRNWCSSGGGSSGGSGGSGGISSGLLSGRSDNHGGSDIQMTQSPSSLSASVGDRVTITCRASQSISSYLNWYQQKPGKAPKLLIYAASSLQSGVPSRFSGSGSGTDFTLTISSLQPEDFATYYCQQDNGYPSTFGGGTKVEIKR

SEQ ID NO: 1188 - protein, 158 aa, Artificial Sequence
  chemically synthesized
QGQSGSPCHPHPADARPYCNVGGGSSGGSGGSGGISSGLLSGRSDNHGGSDIQMTQSPSSLSASVGDRVTITCRASQSISSYLNWYQQKPGKAPKLLIYAASSLQSGVPSRFSGSGSGTDFTLTISSLQPEDFATYYCQQDNGYPSTFGGGTKVEIKR

SEQ ID NO: 1189 - protein, 152 aa, Artificial Sequence
  chemically synthesized
PCHPHPADARPYCNVGGGSSGGSGGSGGISSGLLSGRSDNHGGSDIQMTQSPSSLSASVGDRVTITCRASQSISSYLNWYQQKPGKAPKLLIYAASSLQSGVPSRFSGSGSGTDFTLTISSLQPEDFATYYCQQDNGYPSTFGGGTKVEIKR

SEQ ID NO: 1190 - protein, 158 aa, Artificial Sequence
  chemically synthesized
QGQSGSPCHPHPYAARPYCNVGGGSSGGSGGSGGISSGLLSGRSDNHGGSDIQMTQSPSSLSASVGDRVTITCRASQSISSYLNWYQQKPGKAPKLLIYAASSLQSGVPSRFSGSGSGTDFTLTISSLQPEDFATYYCQQDNGYPSTFGGGTKVEIKR

SEQ ID NO: 1191 - protein, 152 aa, Artificial Sequence
  chemically synthesized
PCHPHPYAARPYCNVGGGSSGGSGGSGGISSGLLSGRSDNHGGSDIQMTQSPSSLSASVGDRVTITCRASQSISSYLNWYQQKPGKAPKLLIYAASSLQSGVPSRFSGSGSGTDFTLTISSLQPEDFATYYCQQDNGYPSTFGGGTKVEIKR

SEQ ID NO: 1192 - protein, 5 aa, Artificial Sequence
  chemically synthesized
GQSGS

SEQ ID NO: 1193 - protein, 4 aa, Artificial Sequence
  chemically synthesized
QSGS

SEQ ID NO: 1194 - protein, 3 aa, Artificial Sequence
  chemically synthesized
SGS

SEQ ID NO: 1195 - protein, 2 aa, Artificial Sequence
  chemically synthesized
GS

SEQ ID NO: 1196 - protein, 6 aa, Artificial Sequence
  chemically synthesized
QGQSGQ

SEQ ID NO: 1197 - protein, 5 aa, Artificial Sequence
  chemically synthesized
GQSGQ

SEQ ID NO: 1198 - protein, 4 aa, Artificial Sequence
  chemically synthesized
QSGQ

SEQ ID NO: 1199 - protein, 2 aa, Artificial Sequence
  chemically synthesized
GQ

SEQ ID NO: 1200 - protein, 153 aa, Artificial Sequence
  chemically synthesized
QGQSGSGIALCPSHFCQLPQTGGGSSGGSGGSGGAVGLLAPPGGSDIQMTQSPSSLSASVGDRVTITCRASQSISSYLNWYQQKPGKAPKLLIYAASSLQSGVPSRFSGSGSGTDFTLTISSLQPEDFATYYCQQDNGYPSTFGGGTKVEIKR

SEQ ID NO: 1201 - protein, 147 aa, Artificial Sequence
  chemically synthesized
GIALCPSHFCQLPQTGGGSSGGSGGSGGAVGLLAPPGGSDIQMTQSPSSLSASVGDRVTITCRASQSISSYLNWYQQKPGKAPKLLIYAASSLQSGVPSRFSGSGSGTDFTLTISSLQPEDFATYYCQQDNGYPSTFGGGTKVEIKR

SEQ ID NO: 1202 - protein, 445 aa, Artificial Sequence
  chemically synthesized
EVQLLESGGGLVQPGGSLRLSCAASGFTFSSYAMSWVRQAPGKGLEWVSSIWRNGIVTVYADSVKGRFTISRDNSKNTLYLQMNSLRAEDTAVYYCAKWSAAFDYWGQGTLVTVSSASTKGPSVFPLAPSSKSTSGGTAALGCLVKDYFPEPVTVSWNSGALTSGVHTFPAVLQSSGLYSLSSVVTVPSSSLGTQTYICNVNHKPSNTKVDKKVEPKSCDKTHTCPPCPAPELLGGPSVFLFPPKPKDTLMISRTPEVTCVVVDVSHEDPEVKFNWYVDGVEVHNAKTKPREEQYQSTYRVVSVLTVLHQDWLNGKEYKCKVSNKALPAPIEKTISKAKGQPREPQVYTLPPSREEMTKNQVSLTCLVKGFYPSDIAVEWESNGQPENNYKTTPPVLDSDGSFFLYSKLTVDKSRWQQGNVFSCSVMHEALHNHYTQKSLSLSPG

1. An isolated antibody or antigen binding fragment thereof (AB) that specifically binds to mammalian PDL1, wherein the AB has one or more of the following characteristics:
(a) the AB specifically binds to human PDL1 and murine PDL1;
(b) the AB specifically binds to human PDL1 and cynomolgus monkey PDL1;
(c) the AB specifically binds to human PDL1, murine PDL1, and cynomolgus monkey PDL1;
(d) the AB inhibits binding of human B7-1 and human PD1 to human PDL1 with an EC₅₀ value less than 10 nM;
(e) the AB inhibits binding of murine B7-1 and murine PD1 to murine PDL1 with an EC₅₀ value less than 10 nM; and
(f) the AB inhibits binding of cynomolgus monkey B7-1 and cynomolgus monkey PD1 to cynomolgus monkey PDL1 with an EC₅₀ value less than 10 nM.

2. An activatable antibody that, in an activated state, specifically binds to mammalian PDL1, wherein said activatable antibody comprises:
an antibody or an antigen binding fragment thereof (AB) that specifically binds to mammalian PDL1;
a masking moiety (MM) that inhibits the binding of the AB to mammalian PDL1 when the activatable antibody is in an uncleaved state; and
a cleavable moiety (CM) coupled to the AB, wherein the CM is a polypeptide that functions as a substrate for a protease.

3. The activatable antibody of claim 2, wherein the activatable antibody, in an activated state,
specifically blocks a natural ligand of PDL1 from binding to the mammalian PDL1.

4. The activatable antibody of claim 2, wherein the activatable antibody has one or more of the following characteristics selected from the group consisting of:
(i) the activatable antibody in an uncleaved state specifically binds to the mammalian PDL1 with a dissociation constant of
(a) 1 to 2 nM, 1 to 5 nM, 1 to 10 nM, 1 to 15 nM, 1 to 20 nM, 1 to 25 nM,
(b) 2 nM to 5 nM, 2 nM to 10 nM, 2 nM to 15 nM, 2 to 20 nM, 2 to 25 nM,
(c) 5 nM to 10 nM, 5 nM to 15 nM, 5 to 20 nM, 5 to 25 nM,
(d) 10 nM to 15 nM, 10 to 20 nM, 10 to 25 nM,
(e) 15 to 20 nM, 15 to 25 nM, or
(f) 20 to 25 nM;
(ii) the activatable antibody in an activated state specifically binds to the mammalian PDL1 with a dissociation constant of
(a) 0.01 nM to 1 nM, 0.05 nM to 1 nM, 0.1 nM to 1 nM, 0.2 nM to 1 nM, 0.3 nM to 1 nM, 0.4 nM to 1 nM, 0.5 nM to 1 nM, 0.75 nM to 1 nM,
(b) 0.01 nM to 0.75 nM, 0.05 nM to 0.75 nM, 0.1 nM to 0.75 nM, 0.2 nM to 0.75 nM, 0.3 nM to 0.75 nM, 0.4 nM to 0.75 nM, 0.5 nM to 0.75 nM,
(c) 0.01 nM to 0.5 nM, 0.05 nM to 0.5 nM, 0.1 nM to 0.5 nM, 0.2 nM to 0.5 nM, 0.3 nM to 0.5 nM, 0.4 nM to 0.5 nM,
(d) 0.01 nM to 0.4 nM, 0.05 nM to 0.4 nM, 0.1 nM to 0.4 nM, 0.2 nM to 0.4 nM, 0.3 nM to 0.4 nM,
(e) 0.01 nM to 0.3 nM, 0.05 nM to 0.3 nM, 0.1 nM to 0.3 nM, 0.2 nM to 0.3 nM,
(f) 0.01 nM to 0.2 nM, 0.05 nM to 0.2 nM, 0.1 nM to 0.2 nM,
(g) 0.01 nM to 0.1 nM, 0.05 nM to 0.1 nM, or
(h) 0.01 nM to 0.05 nM; and
(iii) the activatable antibody comprises an AB that specifically binds to the mammalian PDL1 with a dissociation constant of
(a) 0.01 nM to 1 nM, 0.05 nM to 1 nM, 0.1 nM to 1 nM, 0.2 nM to 1 nM, 0.3 nM to 1 nM, 0.4 nM to 1 nM, 0.5 nM to 1 nM, 0.75 nM to 1 nM,
(b) 0.01 nM to 0.75 nM, 0.05 nM to 0.75 nM, 0.1 nM to 0.75 nM, 0.2 nM to 0.75 nM, 0.3 nM to 0.75 nM, 0.4 nM to 0.75 nM, 0.5 nM to 0.75 nM,
(c) 0.01 nM to 0.5 nM, 0.05 nM to 0.5 nM, 0.1 nM to 0.5 nM, 0.2 nM to 0.5 nM, 0.3 nM to 0.5 nM, 0.4 nM to 0.5 nM,
(d) 0.01 nM to 0.4 nM, 0.05 nM to 0.4 nM, 0.1 nM to 0.4 nM, 0.2 nM to 0.4 nM, 0.3 nM to 0.4 nM,
(e) 0.01 nM to 0.3 nM, 0.05 nM to 0.3 nM, 0.1 nM to 0.3 nM, 0.2 nM to 0.3 nM,
(f) 0.01 nM to 0.2 nM, 0.05 nM to 0.2 nM, 0.1 nM to 0.2 nM,
(g) 0.01 nM to 0.1 nM, 0.05 nM to 0.1 nM, or
(h) 0.01 nM to 0.05 nM.

5.-6. (canceled)

7. The activatable antibody of claim 2, wherein the mammalian PDL1 has one or more of the following characteristics selected from the group consisting of:
(i) the mammalian PDL1 is selected from the group consisting of a human PDL1, a murine PDL1, a rat PDL1, and a cynomolgus monkey PDL1; and
(ii) the mammalian PDL1 is a human PDL1.

8. The activatable antibody of claim 2, wherein the AB has one or more of the following characteristics selected from the group consisting of:
(i) the AB specifically binds to human PDL1, murine PDL1 or cynomolgus monkey PDL1 with a dissociation constant of less than 1 nM;
(ii) the AB specifically binds to human PDL1 and murine PDL1;
(iii) the AB specifically binds to human PDL1 and cynomolgus monkey PDL1;
(iv) the AB specifically binds to human PDL1, murine PDL1, and cynomolgus monkey PDL1;
(v) the AB inhibits binding of human B7-1 and human PD1 to human PDL1;
(vi) the AB inhibits binding of murine B7-1 and murine PD1 to murine PDL1; and
(vii) the AB inhibits binding of cynomolgus monkey B7-1 and cynomolgus monkey PD1 to cynomolgus monkey PDL1.

9.-11. (canceled)

12. The activatable antibody of claim 2, wherein the AB blocks the ability of a natural ligand to bind to the mammalian PDL1 with an EC₅₀ of
(a) 0.5 nM to 10 nM, 0.5 nM to 5 nM, 0.5 nM to 3 nM, 0.5 nM to 2 nM, 0.5 nM to 1 nM,
(b) 1 nM to 10 nM, 1 nM to 5 nM, 1 nM to 3 nM, 1 nM to 2 nM,
(c) 2 nM to 10 nM, 2 nM to 5 nM, 2 nM to 3 nM,
(d) 3 nM to 10 nM, 3 nM to 5 nM, or
(e) 5 nM to 10 nM.

13. The activatable antibody of claim 12, wherein the natural ligand has one or more of the following characteristics selected from the group consisting of:
(i) the natural ligand is a mammalian PD1;
(ii) the natural ligand is selected from the group consisting of: a human PD1, a murine PD1, and a cynomolgus monkey PD1;
(iii) the natural ligand is a mammalian B7-1; and
(iv) the natural ligand is selected from the group consisting of: a human B7-1, a murine B7-1, and a cynomolgus monkey B7-1.

14.-16. (canceled)

17. The activatable antibody of claim 2, wherein:
(a) the AB induces type 1 diabetes in a non-obese diabetic (NOD) mouse; and
(b) the activatable antibody in an uncleaved state inhibits the induction of type 1 diabetes in a NOD mouse.

18. The activatable antibody of claim 17, wherein the activatable antibody inhibits the induction of type 1 diabetes in the NOD mouse after administration of the activatable antibody at a single dose of
(a) 0.1 mg/kg to 3 mg/kg, 0.5 mg/kg to 3 mg/kg, 1 mg/kg to 3 mg/kg, 2 mg/kg to 3 mg/kg,
(b) 0.1 mg/kg to 2 mg/kg, 0.5 mg/kg to 2 mg/kg, 1 mg/kg to 2 mg/kg,
(c) 0.1 mg/kg to 1 mg/kg, 0.5 mg/kg to 1 mg/kg, or
(d) 0.1 mg/kg to 0.5 mg/kg.

19. The activatable antibody of claim 2, wherein:
(a) the activatable antibody in an uncleaved state does not induce type 1 diabetes in greater than 50% of a population of non-obese diabetic (NOD) mice, and
(b) the AB induces type 1 diabetes in greater than 50% of a population of NOD mice.

20. The activatable antibody of claim 19, wherein the activatable antibody does not induce type 1 diabetes in greater than 50% of the population of NOD mice after administration to each mouse in the population a single dose of the activatable antibody at a dosage of:
(a) 0.1 mg/kg to 3 mg/kg, 0.5 mg/kg to 3 mg/kg, 1 mg/kg to 3 mg/kg, 2 mg/kg to 3 mg/kg,
(b) 0.1 mg/kg to 2 mg/kg, 0.5 mg/kg to 2 mg/kg, 1 mg/kg to 2 mg/kg,
(c) 0.1 mg/kg to 1 mg/kg, 0.5 mg/kg to 1 mg/kg, or
(d) 0.1 mg/kg to 0.5 mg/kg.

21. The activatable antibody of claim 19, wherein:
(a) the activatable antibody in an uncleaved state does not induce type 1 diabetes in greater than 50% of a population of non-obese diabetic (NOD) mice when administered at a single dose of 1 mg/kg; and
(b) the AB induces type 1 diabetes in greater than 50% of a population of NOD mice, when administered at a single dose of 1 mg/kg.

22. The activatable antibody of claim 17, wherein the NOD mouse is a female NOD/ShiLtJ mouse substrain.

23. The activatable antibody of claim 17, wherein the activatable antibody has one or more of the following characteristics selected from the group consisting of:
(i) the activatable antibody inhibits the induction of type 1 diabetes in a NOD mouse by at least 3-fold compared to the AB; and
(ii) the activatable antibody exhibits a safety margin that is at least a three-fold safety margin relative to the AB.

24. (canceled)

25. The activatable antibody of claim 2, wherein the activatable antibody in an uncleaved state binds to a smaller percentage of a population of peripheral blood CD4+ CD8+ T lymphocytes than does the AB.

26. The activatable antibody of claim 25, wherein the peripheral blood CD4+ CD8+ T lymphocytes are murine.

27. The activatable antibody of claim 26, wherein the murine peripheral blood CD4+ CD8+ T lymphocytes are derived from a tumor-bearing mouse.

28. The activatable antibody of claim 2, wherein the activatable antibody has one or more of the following characteristics selected from the group consisting of:
(i) the AB comprises:
(a) a variable heavy chain complementarity determining region 1 (VH CDR1) comprising the amino acid sequence of SEQ ID NO: 212;
(b) a variable heavy chain complementarity determining region 2 (VH CDR2) comprising an amino acid sequence selected from the group consisting of SEQ ID NOs: 213, 217, 221, 225, 229, 231, and 238-247;
(c) a variable heavy chain complementarity determining region 3 (VH CDR3) comprising an amino acid sequence selected from the group consisting of SEQ ID NOs: 214, 218, 222, 226, 230, 232, and 233-237;
(d) a variable light chain complementarity determining region 1 (VL CDR1) comprising the amino acid sequence of SEQ ID NO: 209;
(e) a variable light chain complementarity determining region 2 (VL CDR2) comprising an amino acid sequence selected from the group consisting of SEQ ID NOs: 210, 215, 219, 223, and 227; and
(f) a variable light chain complementarity determining region 3 (VL CDR3) comprising an amino acid sequence selected from the group consisting of SEQ ID NOs: 211, 216, 220, 224, and 228;
(ii) the AB comprises a VL CDR1 sequence comprising RASQSISSYLN (SEQ ID NO: 209); a VL CDR2 sequence comprising AASSLQS (SEQ ID NO: 215); a VL CDR3 sequence comprising DNGYPST (SEQ ID NO: 228); a VH CDR1 sequence comprising SYAMS (SEQ ID NO: 212); a VH CDR2 sequence comprising SSIWRNGIVTVYADS (SEQ ID NO: 246); and a VH CDR3 sequence comprising WSAAFDY (SEQ ID NO: 235);
(iii) the AB comprises a variable heavy chain (VH) comprising an amino acid sequence selected from the group consisting of SEQ ID NOs: 46, 48, 50, 52, 54, and 56, and a variable light chain (VL) comprising an amino acid sequence selected from the group consisting of SEQ ID NO: 12 and SEQ ID NO: 58; and
(iv) the AB comprises a variable heavy chain (VH) comprising the amino acid sequence of SEQ ID NO: 46 and a variable light chain (VL) comprising the amino acid sequence of SEQ ID NO: 58, or a VH comprising the amino acid sequence of SEQ ID NO: 46 and a VL comprising the amino acid sequence of SEQ ID NO: 12.

29.-31. (canceled)

32. The activatable antibody of claim 2, wherein the MM has one or more of the following characteristics selected from the group consisting of:
(i) the MM has a dissociation constant for binding to the AB that is greater than the dissociation constant of the AB to PDL1;
(ii) the MM does not interfere or compete with the AB for binding to PDL1 when the activatable antibody is in a cleaved state;
(iii) the MM is a polypeptide of no more than 40 amino acids in length;
(iv) the MM polypeptide sequence is different from that of human PDL1;
(v) the MM polypeptide sequence is no more than 50% identical to any natural binding partner of the AB;
(vi) the MM polypeptide sequence is no more than 25% identical to any natural binding partner of the AB; and
(vii) the MM comprises an amino acid sequence selected from the group consisting of SEQ ID NOs: 59-81, 208, and 426.

33.-38. (canceled)

39. The activatable antibody of claim 2, wherein the CM has one or more of the following characteristics selected from the group consisting of:
(i) the CM is a substrate for a protease that is active in diseased tissue;
(ii) the CM comprises an amino acid sequence selected from the group consisting of SEQ ID NOs: 338-394, and 435-445, 883-921, 1009, and 1010; and
(iii) the CM comprises an amino acid sequence selected from the group consisting of SEQ ID NOs: 377-394, 883-921, 1009, and 1010.

40.-41. (canceled)

42. The activatable antibody of claim 2, wherein the antigen binding fragment thereof is selected from the group consisting of a Fab fragment, a F(ab′)2 fragment, a scFv, a scAb, a dAb, a single domain heavy chain antibody, and a single domain light chain antibody.

43. The activatable antibody of claim 2, wherein the AB is linked to the CM.

44. The activatable antibody of claim 43, wherein the AB is linked directly to the CM.

45. The activatable antibody of claim 43, wherein the AB is linked to the CM via a linking peptide.

46. The activatable antibody of claim 2, wherein the MM is linked to the CM such that the activatable antibody in an uncleaved state comprises the structural arrangement from N-terminus to C-terminus as follows: MM-CM-AB or AB-CM-MM.

47. The activatable antibody of claim 46, wherein the activatable antibody comprises a linking peptide between the MM and the CM, a linking peptide between the CM and the AB, or both a linking peptide between the MM and the CM and a linking peptide between the CM and the AB.

48. (canceled)

49. The activatable antibody of claim 46, wherein the activatable antibody comprises a first linking peptide (LP1) and a second linking peptide (LP2), and wherein the activatable antibody in the uncleaved state has the structural arrangement from N-terminus to C-terminus as follows: MM-LP1-CM-LP2-AB or AB-LP2-CM-LP1-MM.

50. The activatable antibody of claim 49, wherein the two linking peptides need not be identical to each other.

51. The activatable antibody of claim 49, wherein each of LP and LP2 is a peptide of about 1 to 20 amino acids in length.

52. The activatable antibody of claim 2, comprising an amino acid sequence selected from the group consisting of:
(i) an amino acid sequence selected from the group consisting of SEQ ID NOs: 83, 85, 87, 89, 91, 93, 95, 97, 99, 101, 103, 105, 107, 109, 111, 113, 115, 117, 119, 121, 123, 125, 127, 129, 131, 133, 135, 137, 139, 141, 143, 145, 147, 149, 151, 153, 155, and 157, 931, 933, 935, 937, 939, 941, 943, 945, 947, 949, 951, 953, 955, 957, 959, 961, 963, 965, 967, 969, 971, 973, 975, 977, 979, 981, 983, 985, 987, 989, 991, 993, 995, 997, 999, 1001, 1003, 1005, and 1144-1191, 1200, and 1201;
(ii) an amino acid sequence selected from the group consisting of SEQ ID NOs: 931, 933, 935, 937, 939, 941, 943, 945, 947, 949, 951, 953, 955, 957, 959, 961, 963, 965, 967, 969, 971, 973, 975, 977, 979, 981, 983, 985, 987, 989, 991, 993, 995, 997, 999, 1001, 1003, 1005, 1145, 1147, 1149, 1151, 1153, 1155, 1157, 1159, 1161, 1163, 1165, 1167, 1169, 1171, 1173, 1175, 1177, 1179, 1181, 1183, 1185, 1187, 1189, 1191, and 1201;
(iii) the amino acid sequence of SEQ ID NO: 428;
(iv) the amino acid sequence of SEQ ID NO: 1008; and
(v) an amino acid sequence selected from the group consisting of SEQ ID NO: 430, 432, 434, and 1202.

53.-55. (canceled)

56. A conjugated activatable antibody comprising the activatable antibody of claim 2 conjugated to an agent.

57. The conjugated activatable antibody of claim 56, wherein the agent has one or more of the following characteristics selected from the group consisting of:
(i) the agent is a toxin or fragment thereof;
(ii) the agent is a microtubule inhibitor;
(iii) the agent is a nucleic acid damaging agent;
(iv) the agent is a dolastatin or a derivative thereof;
(v) the agent is an auristatin or a derivative thereof;
(vi) the agent is a maytansinoid or a derivative thereof;
(vii) the agent is a duocarmycin or a derivative thereof;
(viii) the agent is a calicheamicin or a derivative thereof;
(ix) the agent is auristatin E or a derivative thereof;
(x) the agent is monomethyl auristatin E (MMAE);
(xi) the agent is monomethyl auristatin D (MMAD);
(xii) the agent is DM1;
(xiii) the agent is DM4;
(xiv) the agent is a detectable moiety;
(xv) the agent is a diagnostic agent;
(xvi) the agent is conjugated to the antibody via a linker;
(xvii) the agent is conjugated to the antibody via a cleavable linker; and
(xviii) the agent is conjugated to the antibody via a non-cleavable linker.

58.-69. (canceled)

70. A pharmaceutical composition comprising the activatable antibody of claim 2 and a carrier.

71. The pharmaceutical composition of claim 70 comprising an additional agent.

72. The pharmaceutical composition of claim 71, wherein the additional agent is a therapeutic agent.

73. An isolated nucleic acid molecule encoding the activatable antibody of claim 2.

74. A vector comprising the isolated nucleic acid molecule of claim 73.

75. A method of producing an activatable antibody by culturing a cell under conditions that lead to expression of the activatable antibody, wherein the cell comprises the nucleic acid molecule of claim 73.

76. A method of manufacturing an activatable antibody that, in an activated state, binds to PDL1, the method comprising:
(a) culturing a cell comprising a nucleic acid construct that encodes the activatable antibody under conditions that lead to expression of the activatable antibody of claim 2; and
(b) recovering the activatable antibody.

77. A method of reducing PDL1 activity comprising administering an effective amount of the activatable antibody of claim 2 to a subject in need thereof.

78. A method of blocking binding of a natural ligand to PDL1 comprising administering an effective amount of the activatable antibody of claim 2 to a subject in need thereof.

79. A method of treating, alleviating a symptom of, or delaying the progression of a PDL1-mediated disorder or disease comprising administering a therapeutically effective amount of the activatable antibody of claim 2 to a subject in need thereof.

80. The method of claim 79, wherein the PDL1-mediated disorder or disease is cancer.

81. The method of claim 80, wherein the cancer is a bladder cancer, a bone cancer, a breast cancer, a carcinoid, a cervical cancer, a colon cancer, an endometrial cancer, a glioma, a head and neck cancer, a liver cancer, a lung cancer, a lymphoma, a melanoma, an ovarian cancer, a pancreatic cancer, a prostate cancer, a renal cancer, a sarcoma, a skin cancer, a stomach cancer, a testis cancer, a thyroid cancer, a urogenital cancer, or a urothelial cancer.

82. The method of claim 80, wherein the cancer is selected from the group consisting of melanoma (MEL), renal cell carcinoma (RCC), squamous non-small cell lung cancer (NSCLC), non-squamous NSCLC, colorectal cancer (CRC), castration-resistant prostate cancer (CRPC), hepatocellular carcinoma (HCC), squamous cell carcinoma of the head and neck, carcinomas of the esophagus, ovary, gastrointestinal tract and breast, or a hematologic malignancy such as multiple myeloma, B-cell lymphoma, T-cell lymphoma, Hodgkin's lymphoma/primary mediastinal B-cell lymphoma, and chronic myelogenous leukemia.

83. The method of claim 79, wherein the method comprises administering an additional agent.

84. The method of claim 83, wherein the additional agent is a therapeutic agent.

85. The antibody of claim 1, wherein the antibody has one or more of the following characteristics selected from the group consisting of:
(i) the antibody comprises:
(a) a variable heavy chain complementarity determining region 1 (VH CDR1) comprising the amino acid sequence of SEQ ID NO: 212;
(b) a variable heavy chain complementarity determining region 2 (VH CDR2) comprising an amino acid sequence selected from the group consisting of SEQ ID NOs: 213, 217, 221, 225, 229, 231, and 238-247;
(c) a variable heavy chain complementarity determining region 3 (VH CDR3) comprising an amino acid sequence selected from the group consisting of SEQ ID NOs: 214, 218, 222, 226, 230, 232, and 233-237;
(d) a variable light chain complementarity determining region 1 (VL CDR1) comprising the amino acid sequence of SEQ ID NO: 209;
(e) a variable light chain complementarity determining region 2 (VL CDR2) comprising an amino acid sequence selected from the group consisting of SEQ ID NOs: 210, 215, 219, 223, and 227; and
(f) a variable light chain complementarity determining region 3 (VL CDR3) comprising an amino acid sequence selected from the group consisting of SEQ ID NOs: 211, 216, 220, 224, and 228.
(ii) the antibody comprises a VL CDR1 sequence comprising RASQSISSYLN (SEQ ID NO: 209); a VL CDR2 sequence comprising AASSLQS (SEQ ID NO: 215); a VL CDR3 sequence comprising DNGYPST (SEQ ID NO: 228); a VH CDR1 sequence comprising SYAMS (SEQ ID NO: 212); a VH CDR2 sequence comprising SSIWRNGIVTVYADS (SEQ ID NO: 246); and a VH CDR3 sequence comprising WSAAFDY (SEQ ID NO: 235);
(iii) the antibody comprises a variable heavy chain (VH) comprising an amino acid sequence selected from the group consisting of SEQ ID NOs: 46, 48, 50, 52, 54, and 56, and a variable light chain (VL) comprising an amino acid sequence selected from the group consisting of SEQ ID NO: 12 and SEQ ID NO: 58; and
(iv) the antibody comprises a variable heavy chain (VH) comprising the amino acid sequence of SEQ ID NO: 46 and a variable light chain (VL) comprising the amino acid sequence of SEQ ID NO: 58, or a VH comprising the amino acid sequence of SEQ ID NO: 46 and a VL comprising the amino acid sequence of SEQ ID NO: 12.

86. An isolated nucleic acid molecule encoding the antibody of claim 1.

87. A vector comprising the isolated nucleic acid molecule of claim 86.

88. The isolated antibody of claim 1, wherein the AB specifically binds to mammalian PDL1 with a dissociation constant of
(a) 0.01 nM to 1 nM, 0.05 nM to 1 nM, 0.1 nM to 1 nM, 0.2 nM to 1 nM, 0.3 nM to 1 nM, 0.4 nM to 1 nM, 0.5 nM to 1 nM, 0.75 nM to 1 nM,
(b) 0.01 nM to 0.75 nM, 0.05 nM to 0.75 nM, 0.1 nM to 0.75 nM, 0.2 nM to 0.75 nM, 0.3 nM to 0.75 nM, 0.4 nM to 0.75 nM, 0.5 nM to 0.75 nM,
(c) 0.01 nM to 0.5 nM, 0.05 nM to 0.5 nM, 0.1 nM to 0.5 nM, 0.2 nM to 0.5 nM, 0.3 nM to 0.5 nM, 0.4 nM to 0.5 nM,
(d) 0.01 nM to 0.4 nM, 0.05 nM to 0.4 nM, 0.1 nM to 0.4 nM, 0.2 nM to 0.4 nM, 0.3 nM to 0.4 nM,
(e) 0.01 nM to 0.3 nM, 0.05 nM to 0.3 nM, 0.1 nM to 0.3 nM, 0.2 nM to 0.3 nM,
(f) 0.01 nM to 0.2 nM, 0.05 nM to 0.2 nM, 0.1 nM to 0.2 nM,
(g) 0.01 nM to 0.1 nM, 0.05 nM to 0.1 nM, or
(h) 0.01 nM to 0.05 nM.

89. A conjugated antibody comprising the antibody of claim 1 conjugated to an agent.

90. A method of producing an antibody by culturing a cell under conditions that lead to expression of the antibody, wherein the cell comprises a nucleic acid molecule encoding the antibody of claim 1.

91. A method of reducing PDL1 activity comprising administering an effective amount of the antibody of claim 1 to a subject in need thereof.

92. A method of blocking binding of a natural ligand to PDL1 comprising administering an effective amount of the antibody of claim 1 to a subject in need thereof.

93. A method of treating, alleviating a symptom of, or delaying the progression of a PDL1-mediated disorder or disease comprising administering an effective amount of the antibody of claim 1 to a subject in need thereof.

94. The activatable antibody of claim 19, wherein the NOD mouse is a female NOD/ShiLtJ mouse substrain.

95. The activatable antibody of claim 19, wherein the activatable antibody has one or more of the following characteristics selected from the group consisting of:
(i) the activatable antibody inhibits the induction of type 1 diabetes in a NOD mouse by at least 3-fold compared to the AB; and
(ii) the activatable antibody exhibits a safety margin that is at least a three-fold safety margin relative to the AB.
